(19) United States
(12) Patent Application Publication
(10) Pub. No.: US 2012/0079627 A1
(43) Pub. Date: Mar. 29, 2012

(54) PLANT GENE REGULATORY ELEMENTS

(75) Inventors: Srinivas Gampala, Manhattan, KS (US); Prasanna Kankanala, Manhattan, KS (US); David Lee, Arlington, VA (US); Emily Puckett, Arlington, VA (US); Ramesh Nair, Manhattan, KS (US); Forrest Chumley, Manhattan, KS (US)

(73) Assignee: EDENSPACE SYSTEMS CORPORATION, Manhattan, KS (US)

(21) Appl. No.: 13/375,128

(22) PCT Filed: Jun. 1, 2010
(86) PCT No.: PCT/US2010/036945

§ 371 Date: Nov. 29, 2011

Related U.S. Application Data
(60) Provisional application No. 61/182,467, filed on May 29, 2009.

(51) Int. Cl. A01H 5/00; A01H 5/10; C12N 15/82; C12N 15/113; C12N 15/63

(52) U.S. Cl. 800/300; 536/24.1; 435/320.1; 800/298; 800/303; 800/301; 800/302; 800/320; 800/320.1; 800/320.2; 800/320.3; 800/314; 800/306; 800/317.2; 800/312; 800/322; 800/317.3; 800/317.4

(57) ABSTRACT

Nucleic acids, vectors, and expression vectors comprising novel plant gene regulatory elements from poplar that can drive heterologous gene expression in plants. Novel transgenic plants expressing heterologous genes under the control of novel gene regulatory elements.

### RELATED APPLICATION INFORMATION

[0001] The present application claims priority to and benefit of U.S. provisional patent application 61/182,467, filed on May 29, 2009, the contents of which are herein incorporated by reference in their entirety.

### SEQUENCE LISTING

[0002] The present specification makes reference to a Sequence Listing (submitted electronically as a .txt file named “SequenceListing.txt” on Jun. 1, 2010). The .txt file was generated on Jun. 1, 2010 and is 671 kb in size. The entire contents of the Sequence Listing are herein incorporated by reference.

### BACKGROUND

[0003] Plant gene expression is highly regulated in a tissue-specific and developmental stage-specific manner. Plant gene expression is also regulated in response to many external factors, including biotic and abiotic stress. Nucleotide sequences upstream of gene coding sequences, commonly known as promoters, precisely regulate when and where any particular gene is expressed. Promoters also control the extent of foreign gene expression in transgenic plants and hence are crucial in determining the levels to which a desirable gene can be expressed.

[0004] Over the last three decades, plant biologists have isolated and characterized several plant promoters that can drive heterologous transgene expression. These well-characterized promoters include CaMV 35S promoter (Odell et al. (1985) Nature. 313:810-812), Opine promoters (U.S. Pat. No. 5,955,646), the rice actin promoter (McElroy et al. (1991) Mol Gen Genet. 231:150-160), the maize ubiquitin promoter (Christensen et al. (1992) Plant Mol Biol. 18:675-89.), the maize ADH1 promoter (U.S. Pat. No. 5,001,060) and the Rubisco promoter (Outchkourov et al. (2003) Planta 216:1003-1012).

[0005] Many of the dicot promoters do not perform satisfactorily in monocots such as maize and other cereal crops or grasses. In general, dicot promoters do not require intron sequences downstream of the transcription initiation site to enhance gene expression in transgenic dicot plants, whereas the first intron downstream of monocot promoters often enhances gene expression in transgenic monocot plants (McElroy et al. (1991) Mol Gen Genet. 231:150-160 and Christensen et al. (1992) Plant Mol Biol. 18:675-89).

[0006] Functional assays have demonstrated that differences in required promoter elements of dicot and monocot promoters may be one of the reasons why dicot promoters do not necessarily work well in monocots and vice versa.

### SUMMARY

[0007] The present invention encompasses the recognition that while transgenic dicot plants containing multiple transgenes (stacked traits) are desirable, the ability to create such plants is limited by the availability of suitable promoters for each transgene. The present invention further encompasses the recognition that a collection of novel dicot promoters, with divergent DNA sequences and an optimal range of functional characteristics, would, among other things, facilitate creating of transgenic dicot plants.

[0008] In various aspects, provided are a collection of novel dicot gene regulatory elements (including promoters) from the poplar genome, as well as nucleic acids and vectors (including gene expression vectors) comprising such novel gene regulatory elements. In one aspect, transgenic plants expressing a heterologous gene under the control of novel dicot gene regulatory elements are provided. Novel gene regulatory elements of the invention may in some be embodiments be used in other plants, including other dicots, as well as monocots and multicotyledonous plants.

### BRIEF DESCRIPTION OF THE DRAWING

[0009] FIGS. 1A and 1B schematically illustrate particle bombardment expression vectors pUC18-GUSintron-NOS and pUC18-GUS-NOS respectively. These vectors contain a multiple cloning site (MCS), a GUS reporter gene with the catalase intron (GUSintron; FIG. 1A) or without the catalase intron (GUS; FIG. 1B), and the nopaline synthase terminator (NOS).

[0010] FIGS. 2A and 2B schematically illustrate particle bombardment expression vectors pUC18-PtP-GUSintron-NOS and pUC18-PtP-GUS-NOS respectively. These vectors contain various inventive poplar promoters (PtP), the GUS reporter gene with the catalase intron (GUSintron; FIG. 2A) or without the catalase intron (GUS; FIG. 2B), and the nopaline synthase terminator (NOS).

[0011] FIG. 3 shows GUS reporter gene expression driven by various inventive poplar promoters in poplar leaves. (Expression correlates with blue spots). CMPS, Cestrum Yellow Leaf Curling Virus promoter—short version; PtCal2, poplar calmodulin like-2 promoter; PtUbi2, poplar ubiquitin like-2 promoter, PtL5L2, poplar ribosomal protein L5 like-2 promoter; PtElf1a, poplar elongation factor 1a like-1 promoter.

[0012] FIG. 4 shows GUS reporter gene expression driven by inventive poplar promoter in poplar stem tissues. (Expression correlates with blue spots). CMPS, Cestrum Yellow Leaf Curling Virus promoter—short version; PtCal2, poplar calmodulin like-2 promoter; PtUbi2, poplar ubiquitin like-2 promoter, PtL5L2, poplar ribosomal protein L5 like-2 promoter; PtElf1a, poplar elongation factor 1a like-1 promoter.

[0013] FIGS. 5A and 5B schematically illustrate plant transformation binary vectors pED-MCS-GOI-NOS and pED-PtP-GOI-NOS respectively. pED-MCS-GOI-NOS contains a multi cloning site into which the various invenive poplar promoters (PtP) were cloned (FIG. 5B). ‘GOI’ refers to the gene of interest and ‘NOS’ refers to the nopaline synthase terminator. ‘LB’ indicates the T-DNA left border sequence and ‘RB’ indicates the T-DNA right border sequence.

[0014] FIG. 6 depicts results from an experiment evaluating β-glucan glucohydrolase expression driven by poplar promoter PtL5L2 of the present invention in comparison to that of the CMPS and 35S CMV promoters in five different transgenic events. Expression was measured by assaying glucan glucohydrolase enzyme activity on MUC substrate.

[0015] FIG. 7 depicts results from experiments evaluating GUS reporter gene expression driven by various inventive poplar promoters in stable poplar transgenic leaf (FIGS. 7A-F) and root (FIG. 7G-I) tissues. A non-transgenic poplar leaf was stained for GUS activity (FIG. 7J) as a negative control.

[0016] FIG. 8 depicts measured MUC activity levels for E1 endoglucanase gene driven by 35S, PtL5L2, PtUbi2 and PtPAL2 promoters in tobacco leaf infiltration experiments, along with a negative control (C—). Activity is normalized to the MUC activity (μmol hydrolyzed per μg protein) of the 35S:E1 construct.

[0017] FIG. 9 depicts results from experiments evaluating GUS reporter gene expression driven by various inventive poplar promoters in tobacco leaves infiltrated by Agrobacterium transformed with relevant expression vectors. FIG. 9A shows images of leaf samples transformed with GUS expression vectors under the control of a (C-IM), PtERD4 (pABC262), or PtSAM2 (pABC263) promoter. GUS expression correlates with overall light blue color in leaves expressing GUS under the control of PtERD4 and PtSAM2. FIG. 9B shows images of leaf samples transformed with GUS expression vectors under the control of a control (C-IM) or PtUbi2 (pABC267) promoter. GUS expression correlates with distinct blue color in leaves. The primary and secondary veins did not show any GUS staining and retained the green color.

### DEFINITIONS

[0018] Throughout the specification, several terms are employed that are defined in the following paragraphs.

[0019] As used herein, the terms “about” and “approximately”, in reference to a number, is used herein to include numbers that fall within a range of 20%, 10%, 5%, or 1% in either direction (greater than or less than) the number unless otherwise stated or otherwise evident from the context (except where such number would exceed 100% of a possible value).

[0020] As used herein, the phrase “binary vector” refers to cloning vectors that are capable of replicating in both E. coli and Agrobacterium tumefaciens. In a binary vector system, two different plasmids are employed for generating transgenic plants. In many embodiments, the first plasmid is a small vector known as disarmed Ti plasmid has an origin of replication (ori) that permits the maintenance of the plasmid in a wide range of bacteria including E. coli and Agrobacterium. In many embodiments, the small vector contains foreign DNA in place of T-DNA, the left and right T-DNA borders (or at least the right T-border), markers for selection and maintenance in both E. coli and A. tumefaciens, and a selectable marker for plants. In many embodiments, the second plasmid is known as helper Ti plasmid, harbored in A. tumefaciens, which lacks the entire T-DNA region but contains an intact vir region essential for transfer of the T-DNA from Agrobacterium to plant cells.

[0021] As used herein, the phrase “cell wall-modifying enzyme polypeptide” refers to a polypeptide that modifies at least one component (e.g., xylans, xylan side chains, glucuronoarabinoxylans, xyloglucans, mixed-linkage glucans, pectins, pectates, rhamnogalacturonans, rhamnogalacturonan side chains, lignin, cellulose, mannans, galactans, arabinans, oligosaccharides derived from cell wall polysaccharides, and combinations thereof) or interaction (e.g., covalent linkage, ionic bond interaction, hydrogen bond interaction, and combinations thereof) in plant cell wall. In some embodiments, cell wall-modifying enzyme polypeptides have at least 50%, 60%, 70%, 80% or more overall sequence identity with a polypeptide whose amino acid sequence is set forth in Table 1 of co-pending U.S. patent application Ser. No. 12/476,247 (filed on Jun. 1, 2009), the contents of which are herein incorporated by reference in their entirety. Alternatively or additionally, in some embodiments, cell wall-modifying enzyme polypeptide shows at least 90%, 95%, 96%, 97%, 98%, 99%, or greater identity with at least one sequence element found in a polypeptide whose amino acid sequence is set forth in Table 1 of co-pending U.S. patent application Ser. No. 12/476,247, which sequence element is at least 4, 5, 6, 7, 8, 9, 10, 11, 12, 13, 14, 15, 16, 17, 18, 19, 20 or more amino acids long. In some embodiments, a provided cell wall-modifying enzyme polypeptide disrupts a linkage selected from the group consisting of hemicellulose-cellulose-lignin, hemicellulose-cellulose-pectin, hemicellulosediferululate-hemicellulose, hemicellulose-ferulate-lignin, mixed beta-D-glucan-cellulose, mixed-beta-D-glucan-hemicellulose, pectin-ferulate-lignin linkages, and combinations thereof.

[0022] As used herein, the term “construct”, when used in reference to a gene and/or nucleic acid, refers to a functional unit that allows expression of a gene of interest. Nucleic acid constructs typically comprise, in addition to the gene of interest (i.e., the heterologous gene whose expression is desired), a gene regulatory element capable of driving expression of the gene of interest (such as a promoter) and a terminator (also known as a stop signal), both of which are operably linked to the gene of interest. In some embodiments, constructs comprise additional sequences, e.g. marker genes that are also accompanied by a gene regulatory element (such as a promoter) and a terminator. In many embodiments, the sequences for each of the elements in the construct do not exist in this combination and arrangement in nature and/or are arranged and/or combined by the hand of man.

[0023] As used herein, the phrase “externally applied”, when used to describe enzyme polypeptides used in the processing of biomass, refers to enzyme polypeptides that are not produced by the organism whose biomass is being processed. “Externally applied” enzyme polypeptides as used herein does not include enzyme polypeptides that are expressed (whether endogenously or transgenically) by the organism (e.g., plant) from which the biomass is obtained.

[0024] As used herein, the term “extract”, when used as noun, refers to a preparation from a biological material (such as lignocellulosic biomass) in which a substantial portion of proteins are in solution. In some embodiments of the invention, the extract is a crude extract, e.g., an extract that is prepared by disrupting cells such that proteins are solubilized and optionally removing debris, but not performing further purification steps. In some embodiments of the invention, the extract is further purified in that certain substances, molecules, or combinations thereof are removed.

[0025] As used herein, the term “gene” refers to a discrete nucleic acid sequence responsible for a discrete cellular product and/or performing one or more intracellular or extracellular functions. More specifically, the term “gene” refers to a nucleic acid that includes a portion encoding a protein and optionally encompasses regulatory sequences, such as promoters, enhancers, terminators, and the like, which are involved in the regulation of expression of the protein encoded by the gene of interest. The gene and regulatory sequences may be derived from the same natural source, or may be heterologous to one another. The definition can also include nucleic acids that do not encode proteins but rather provide templates for transcription of functional RNA molecules such as tRNAs, rRNAs, etc. Alternatively, a gene may define a genomic location for a particular event/function, such as the binding of proteins and/or nucleic acids.

[0026] As used herein, the term “gene expression” refers to the conversion of the information, contained in a gene, into a gene product. A gene product can be the direct transcriptional product of a gene (e.g., mRNA, tRNA, rRNA, antisense RNA, ribozyme structural RNA or any other type of RNA) or a protein produced by translation of an mRNA. Gene products also include RNAs that are modified by processes such as capping, polyadenylation, methylation, and editing, proteins post-translationally modified, and proteins modified by, for example, methylation, acetylation, phosphorylation, ubiquitination, ADP ribosylation, myristilation, and glycosylation.

[0027] The terms “genetically modified” and “transgenic” are used herein interchangeably. A transgenic or genetically modified organism is one that has a genetic background which is at least partially due to manipulation by the hand of man through the use of genetic engineering. For example, the term “transgenic cell”, as used herein, refers to a cell whose DNA contains an exogenous nucleic acid not originally present in the non-transgenic cell. A transgenic cell may be derived or regenerated from a transformed cell or derived from a transgenic cell. Exemplary transgenic cells in the context of the present invention include plant calli derived from a stably transformed plant cell and particular cells (such as leaf, root, stem, or reproductive cells) obtained from a transgenic plant. A “transgenic plant” is any plant in which one or more of the cells of the plant contain heterologous nucleic acid sequences introduced by way of human intervention. Transgenic plants typically express DNA sequences, which confer the plants with characters different from that of native, non-transgenic plants of the same strain. The progeny from such a plant or from crosses involving such a plant in the form of plants, seeds, tissue cultures and isolated tissue and cells, which carry at least part of the modification originally introduced by genetic engineering, are comprised by the definition.

[0028] As used herein, the term “genetic probe” refers to a nucleic acid molecule of known sequence, which has its origin in a defined region of the genome and can be a short DNA sequence (or oligonucleotide), a PCR product, or mRNA isolate. Genetic probes are gene-specific DNA sequences to which nucleic acids from a sample (e.g., RNA from a plant extract) are hybridized. Genetic probes specifically bind (or specifically hybridize) to nucleic acid of complementary or substantially complementary sequence through one or more types of chemical bonds, usually through hydrogen bond formation.

[0029] As used herein, the term “gene regulatory element” means an element, typically within a nucleic acid, that has the ability to regulate genes, whether it is a by promoting, enhancing, or attenuating expression. In some embodiments, the gene regulatory element is a promoter. In some embodiments, the gene regulatory element is an enhancer. In some embodiments, gene regulatory elements are located at or near the 5′ end of the first exon of a gene. In some embodiment, gene regulatory elements are located within the region of a gene involved in transcriptional and translational initiation.

[0030] As used herein the term “heterologous”, when used in reference to genes, refers to genes that are not normally associated with other genetic elements with which they are nevertheless associated (e.g., in a nucleic acid construct) in such an arrangement in nature and/or refers to genes that are associated with such other elements by the hand of man. “Heterologous gene products” refers to products of heterologous genes.

[0031] As used herein, the term “lignocellulolytic enzyme polypeptide” refers to a polypeptide that disrupts or degrades lignocellulose, which comprises cellulose, hemicellulose, and lignin. The term “lignocelluloytic enzyme polypeptide” encompasses, but is not limited to cellobiohydrolases, endoglucanases, β-D-glucosidases, xylanases, arabinofuranosidases, acetyl xylan esterases, glucuronidases, mannanases, galactanases, arabinases, lignin peroxidases, manganese-dependent peroxidases, hybrid peroxidases, laccases, ferulic acid esterases and related polypeptides. In some embodiments, disruption or degradation of lignocellulose by a lignocellulolytic enzyme polypeptide leads to the formation of substances including monosaccharides, disaccharides, polysaccharides, and phenols. In some embodiments, a lignocellulolytic enzyme polypeptide shares at least 50%, 60%, 70%, 80% or more overall sequence identity with a polypeptide whose amino acid sequence is set forth in Table 1. Alternatively or additionally, in some embodiments, a lignocellulolytic enzyme polypeptide shows at least 90%, 95%, 96%, 97%, 98%, 99%, or greater identity with at least one sequence element found in a polypeptide whose amino acid sequence is set forth in Table 1, which sequence element is at least 4, 5, 6, 7, 8, 9, 10, 11, 12, 13, 14, 15, 16, 17, 18, 19, 20 or more amino acids long. It will be appreciated that the present invention describes use of lignocellulolytic enzyme polypeptides generally, but also of particular lignocellulolytic enzyme polypeptides (e.g., Acidothermus cellulolyticus E1 endo-1,4-β-glucanase polypeptide, Acidothermus cellulolyticus xylE polypeptide, Acidothermus cellulolyticus gux1 polypeptide, Acidothermus cellulolyticus aviIII polypeptide, and Talaromyces emersonii cbhE polypeptide).

[0032] As used herein, the term “mixed linkage glucans” refer to non-cellulosic glucans present in plants and often enriched in seed bran. β-D-glucan residues of mixed-linkage glucans are unbranched but contain both (1→3) and (1→4)-linkages. In some embodiments, enzymes that modify mixed-linkage glucans include laminarinase (E.C. 3.2.1.39), licheninase (E.C. 3.2.1.73/74). In some embodiments, some cellulases can hydrolyze certain (1→4)-linkages.

[0033] As used herein, the term “nucleic acid construct” refers to a polynucleotide or oligonucleotide comprising nucleic acid sequences not normally associated in nature. A nucleic acid construct of the present invention is prepared, isolated, or manipulated by the hand of man. The terms “nucleic acid”, “polynucleotide” and “oligonucleotide” are used herein interchangeably and refer to a deoxyribonucleotide (DNA) or ribonucleotide (RNA) polymer either in single- or double-stranded form. For the purposes of the present invention, these terms are not to be construed as limited with respect to the length of the polymer and should also be understood to encompass analogs of DNA or RNA polymers made from analogs of natural nucleotides and/or from nucleotides that are modified in the base, sugar and/or phosphate moieties.

[0034] As used herein, the term “operably linked” refers to a relationship between two nucleic acid sequences wherein the expression of one of the nucleic acid sequences is controlled by, regulated by or modulated by the other nucleic acid sequence. In some embodiments, a nucleic acid sequence that is operably linked to a second nucleic acid sequence is covalently linked, either directly or indirectly, to such second sequence, although any effective three-dimensional association is acceptable. A single nucleic acid sequence can be operably linked to multiple other sequences. For example, a single promoter can direct transcription of multiple RNA species.

[0035] As will be clear from the context, the term “plant”, as used herein, can refer to a whole plant, plant parts (e.g., cuttings, tubers, pollen), plant organs (e.g., leaves, stems, flowers, roots, fruits, branches, etc.), individual plant cells, groups of plant cells (e.g., cultured plant cells), protoplasts, plant extracts, seeds, and progeny thereof. The class of plants that may be used in the methods of the present invention is as broad as the class of higher plants amenable to transformation techniques, including both monocotyledonous and dicotyledonous plants, as well as certain lower plants such as algae. The term includes plants of a variety of a ploidy levels, including polyploid, diploid and haploid. In certain embodiments of the invention, plants are green field plants. In other embodiments, plants are grown specifically for “biomass energy”. For example, suitable plants include, but are not limited to, alfalfa, bamboo, barley, canola, corn, cotton, cottonwood (e.g. Populus deltoides), eucalyptus, miscanthus, poplar, pine (pinus sp.), potato, rape, rice, soy, sorghum, sugar beet, sugarcane, sunflower, sweetgum, switchgrass, tobacco, turf grass, wheat, and willow. Using transformation methods, genetically modified plants, plant cells, plant tissue, seeds, and the like can be obtained.

[0036] As used herein, “plant biomass” refers to biomass that includes a plurality of components found in plant, such as lignin, cellulose, hemicellulose, beta-glucans, homogalacturonans, and rhamnogalacturonans. Plant biomass may be obtained, for example, from a transgenic plant expressing at least one cell wall-modifying enzyme polypeptide as described herein. Plant biomass may be obtained from any part of a plant, including, but not limited to, leaves, stems, seeds, and combinations thereof.

[0037] As used herein, the term “polypeptide” generally has its art-recognized meaning of a polymer of at least three amino acids. However, the term is also used to refer to specific functional classes of polypeptides, such as, for example, lignocellulolytic enzyme polypeptides (including, for example, Acidothermus cellulolyticus E1 endo-1,4-β-glucanase polypeptide, Acidothermus cellulolyticus xylE polypeptide, Acidothermus cellulolyticus gux1 polypeptide, Acidothermus cellulolyticus aviIII polypeptide, and Talaromyces emersonii cbhE polypeptide). For each such class, the present specification provides specific examples of known sequences of such polypeptides. Those of ordinary skill in the art will appreciate, however, that the term “polypeptide” is intended to be sufficiently general as to encompass not only polypeptides having the complete sequence recited herein (or in a reference or database specifically mentioned herein), but also to encompass polypeptides that represent functional fragments (i.e., fragments retaining at least one activity) of such complete polypeptides. Moreover, those of ordinary skill in the art understand that protein sequences generally tolerate some substitution without destroying activity. Thus, any polypeptide that retains activity and shares at least about 30-40% overall sequence identity, often greater than about 50%, 60%, 70%, or 80%, and further usually including at least one region of much higher identity, often greater than 90% or even 95%, 96%, 97%, 98%, or 99% in one or more highly conserved regions, usually encompassing at least 3-4 and often up to 20 or more amino acids, with another polypeptide of the same class, is encompassed within the relevant term “polypeptide” as used herein. Other regions of similarity and/or identity can be determined by those of ordinary skill in the art by analysis of the sequences of various polypeptides presented herein.

[0038] As used herein, the term “pretreatment” refers to a thermo-chemical process to remove lignin and hemicellulose bound to cellulose in plant biomass, thereby increasing accessibility of the cellulose to cellulases for hydrolysis. Common methods of pretreatment involve using dilute acid (such as, for example, sulfuric acid), ammonia fiber expansion (AFEX), steam explosion, lime, and combinations thereof.

[0039] As used herein, the terms “promoter” and “promoter element” refer to a polynucleotide that regulates expression of a selected polynucleotide sequence operably linked to the promoter, and which effects expression of the selected polynucleotide sequence in cells. The term “plant promoter”, as used herein, refers to a promoter that functions in a plant. In some embodiments of the invention, the promoter is a constitutive promoter, i.e., an unregulated promoter that allows continual expression of a gene associated with it. A constitutive promoter may in some embodiments allow expression of an associated gene throughout the life of the plant. Examples of constitutive plant promoters include, but are not limited to, rice act1 promoter, Cauliflower mosaic virus (CaMV) 35S promoter, and nopaline synthase promoter from Agrobacterium tumefaciens. In some embodiments, the promoter is a promoter from poplar. In some embodiments, the promoter comprises a polynucleotide having a sequence of at least one of SEQ ID NO: 1 to 158. In some embodiments of the invention, the promoter is a tissue-specific promoter that selectively functions in a part of a plant body, such as a flower. In some embodiments of the invention, the promoter is a developmentally specific promoter. In some embodiments of the invention, the promoter is an inducible promoter. In some embodiments of the invention, the promoter is a senescence promoter, i.e., a promoter that allows transcription to be initiated upon a certain event relating to the age of the organism.

[0040] As used herein, the term “protoplast” refers to an isolated plant cell without cell walls which has the potency for regeneration into cell culture or a whole plant.

[0041] As used herein, the term “regeneration” refers to the process of growing a plant from a plant cell (e.g., plant protoplast, plant callus or plant explant).

[0042] As used herein, the term “stably transformed”, when applied to a plant cell, callus or protoplast refers to a cell, callus or protoplast in which an inserted exogenous nucleic acid molecule is capable of replication either as an autonomously replicating plasmid or as part of the host chromosome. The stability is demonstrated by the ability of the transformed cells to establish cell lines or clones comprised of a population of daughter cells containing the exogenous nucleic acid molecule.

[0043] As used herein, the term “tempering” refers to a process to condition lignocellulosic biomass prior to pretreatment so as to favor improved yield from hydrolysis and/or allow use of less severe pretreatment conditions without sacrificing yield. In some embodiments, the lignocellulosic biomass transgenically expresses a lignocellulolytic enzyme polypeptide and tempering facilitates activation of the lignocellulolytic enzyme polypeptide. In some embodiments, tempering facilitates improved yield from subsequent hydrolysis as compared to yield obtained from processing without tempering. In some embodiments, tempering facilitates comparable or improved yield from subsequent hydrolysis using less severe pretreatment conditions than would be required without tempering. In some embodiments, tempering comprises a process selected from the group consisting of ensilement, grinding, pelleting, forming a warm water suspension and/or slurry, incubating at a specific temperature, incubating at a specific pH, and combinations thereof. In some embodiments, tempering comprises separating liquid from a slurry that contains soluble sugars and crude enzyme extracts and re-addition of the separated liquid back to the solid biomass after pretreatment. Specific conditions for tempering may depend on specific traits (such as, e.g., traits of the transgene) of the biomass.

[0044] As used herein, the term “tissue-preferred”, when used in reference to a gene regulatory element (such as a promoter) or an expression pattern, means characterized by expression preferences in certain tissues. For example, a tissue-preferred promoter can drive and/or facilitate expression that is high in certain tissues (eg. stem) but in low in others.

[0045] As used herein, the term “tissue-specific”, when used in reference to a gene regulatory element (such as a promoter) or an expression pattern, means characterized by expression only in certain tissues. For example, a tissue-specific promoter can drive and/or facilitate expression in some tissues but not others.

[0046] As used herein, the term “transformation” refers to a process by which an exogenous nucleic acid molecule (e.g., a vector or recombinant DNA molecule) is introduced into a recipient cell, callus or protoplast. The exogenous nucleic acid molecule may or may not be integrated into (i.e., covalently linked to) chromosomal DNA making up the genome of the host cell, callus or protoplast. For example, the exogenous polynucleotide may be maintained on an episomal element, such as a plasmid. Alternatively, the exogenous polynucleotide may become integrated into a chromosome so that it is inherited by daughter cells through chromosome replication. Methods for transformation include, but are not limited to, electroporation, magnetoporation, Ca2+ treatment, injection, particle bombardment, retroviral infection, and lipofection. In some circumstances, an exogenous nucleic acid is introduced in to a cell by mating with another cell. For example, in S. cerevisiae, cells mate with one another.

[0047] The term “transgene”, as used herein, refers to an exogenous gene which, when introduced into a host cell through the hand of man, for example, using a process such as transformation, electroporation, particle bombardment, and the like, is expressed by the host cell and integrated into the cell's DNA such that the trait or traits produced by the expression of the transgene is inherited by the progeny of the transformed cell. A transgene may be partly or entirely heterologous (i.e., foreign to the cell into which it is introduced). Alternatively, a transgene may be homologous to an endogenous gene of the cell into which it is introduced, but is designed to be inserted (or is inserted) into the cell's genome in such a way as to alter the genome of the cell (e.g., it is inserted at a location which differs from that of the natural gene or its insertion results in a knockout). A transgene can also be present in a cell in the form of an episome. A transgene can include one or more transcriptional regulatory sequences and other nucleic acids, such as introns. Alternatively or additionally, a transgene is one that is not naturally associated with the vector sequences with which it is associated according to the present invention.

### DETAILED DESCRIPTION OF CERTAIN EMBODIMENTS

[0048] In various embodiments, the present invention provides, among other things, novel nucleic acids and vectors comprising novel gene regulatory elements from poplar that can be used to express a gene of interest in a variety of cells, including both monocot and dicot plants. Monocot and dicot transgenic plants expressing heterologous genes under the control of a novel gene regulatory element are also provided. Gene regulatory elements of the present invention include those that, in their endogenous contexts, collectively regulate several classes of genes that are involved in plant cell structure and function, intermediary metabolism, tissue-specific and developmental stage-specific functions. Gene regulatory elements of the present invention collectively demonstrate a useful range of properties with regard to gene expression, including, but not limited to, promoter strength, tissue- and/or developmental stage-specificity, and responsiveness to stimuli.

### I. Nucleic Acids

[0049] Nucleic acids of the present invention generally comprise a characteristic sequence corresponding to a novel gene regulatory element from sorghum.

[0050] Nucleotide sequences of certain provided sorghum gene regulatory elements are listed as SEQ ID NOs: 1 to 158 and presented in Table 3. In some embodiments, nucleotide sequences of provided nucleic acids comprise a sequence having at least 65%, at least 70%, at least 75%, at least 80%, at least 85%, at least 90%, at least 95%, at least 96%, at least 97%, at least 98%, at least 99%, or more identity to at least one of SEQ ID NO.: 1 to 158. In some embodiments, nucleotide sequences of provided nucleic acids comprise a sequence having at least 65%, at least 70%, at least 75%, at least 80%, at least 85%, at least 90%, at least 95%, at least 96%, at least 97%, at least 98%, at least 99%, or more identity to at least one of SEQ ID NO: 90, 94, 103, 117, 131, 137, 145, and 158. (See, e.g., Examples 2, 3, 4, and 5). In some embodiments, the nucleotide sequences of provided nucleic acids comprise a sequence having at least 65%, at least 70%, at least 75%, at least 80%, at least 85%, at least 90%, at least 95%, at least 96%, at least 97%, at least 98%, at least 99%, or more sequence identity to at least one of SEQ ID NO: 90 and 103.

[0051] In many embodiments, provided nucleic acids comprise gene regulatory elements from poplar. In some such embodiments, the gene regulatory elements are promoters, that is, they can drive expression of a gene that is operably linked.

[0052] Nucleic acids of the invention may include, in addition to nucleotide sequences described above, sequences that can facilitate manipulations such as molecular cloning. For example, restriction enzyme recognition sites and/or recombinase recognition sites may be included in inventive nucleic acids.

[0053] Nucleic acids of the present invention included single stranded and double stranded nucleic acids. DNA, RNA, DNA:RNA heteroduplexes, RNA:RNA duplexes, and DNA-RNA hybrid molecules are contemplated and included. In some embodiments, nucleic acids of the present invention include unconventional nucleotides, chemically modified nucleotides, and/or labeled nucleotides (e.g., radiolabeled, fluorescently labeled, enzymatically labeled, etc.). For example, modifications, labels, and/or use of unconventional nucleotides may facilitate downstream manipulations and/or analyses.

### II. Vectors

[0054] Gene vectors of the present invention generally contain a nucleic acid construct that includes one or more expression cassettes for expression of a gene of interest (e.g., a heterologous gene) in a plant of interest. Nucleic acid constructs (also known as “gene constructs”) act as a functional unit that allows expression of a gene of interest. Nucleic acid constructs typically comprise, in addition to the gene of interest (e.g., a heterologous gene whose expression is desired), a gene regulatory element capable of driving expression of the gene of interest (such as a promoter) and a terminator (also known as a stop signal), both of which are operably linked to the gene of interest.

[0055] In many embodiments, the gene regulatory element regulates expression of the gene of interest (such as a heterologous gene).

[0056] In some embodiments, constructs comprise additional sequences, e.g. marker genes, which are also accompanied by a gene regulatory element (such as a promoter) and a terminator. In many embodiments, the sequences for each of the elements in the construct do not exist in this combination and arrangement in nature and/or are arranged and/or combined by the hand of man.

### A. Expression Cassettes

[0057] Expression cassettes generally include 5′ and 3′ regulatory sequences operably linked to a nucleotide sequence encoding a gene of interest.

[0058] Techniques used to isolate or clone a gene of interest are known in the art and include isolation from genomic DNA, preparation from cDNA, or a combination thereof. Cloning of a gene from such genomic DNA, can be effected, e.g., by using polymerase chain reaction (PCR) or antibody screening or expression libraries to detect cloned DNA fragments with shared structural features (Innis et al., “PCR: A Guide to Method and Application”, 1990, Academic Press: New York). Alternatively or additionally, other nucleic acid amplification procedures such as ligase chain reaction (LCR), ligated activated transcription (LAT) and nucleotide sequence-based amplification (NASBA) may be used.

[0059] Expression cassettes generally include the following elements (presented in the 5′-3′ direction of transcription): a transcriptional and translational initiation region, a coding sequence for a gene of interest, and a transcriptional and translational termination region functional in the organism where it is desired to express the gene of interest (such as a plant).

[0060] Other sequences that can be present in a nucleic acid construct include sequences that enhance gene expression (such as, for example, intron sequences and leader sequences). Examples of introns that have been reported to enhance expression include, but are not limited to, introns of the Maize Adh1 gene and introns of the Maize bronze1 gene (J. Callis et. al., Genes Develop. 1987, 1: 1183-1200). Examples of non-translated leader sequences that are known to enhance expression include, but are not limited to, leader sequences from Tobacco Mosaic Virus (TMV, the “omegasequence”), Maize Chlorotic Mottle Virus (MCMV), and Alfalfa Mosaic Virus (AlMV) (see, for example, D. R. Gallie et al., Nucl. Acids Res. 1987, 15: 8693-8711; J. M. Skuzeski et. al., Plant Mol. Biol. 1990, 15: 65-79).

[0061] Where appropriate, the gene(s) or polynucleotide sequence(s) encoding the enzyme(s) of interest may be modified to include codons that are optimized for expression in the transformed plant (Campbell and Gowri, Plant Physiol., 1990, 92: 1-11; Murray et al., Nucleic Acids Res., 1989, 17: 477-498; Wada et al., Nucl. Acids Res., 1990, 18: 2367, and U.S. Pat. Nos. 5,096,825; 5,380,831; 5,436,391; 5,625,136, 5,670,356 and 5,874,304). Codon optimized sequences are synthetic sequences, and preferably encode the identical polypeptide (or an enzymatically active fragment of a full length polypeptide which has substantially the same activity as the full length polypeptide) encoded by the non-codon optimized parent polynucleotide.

### 1. Transcriptional and Translational Initiation

[0062] Transcriptional initiation regions (also known as gene promoters, which may be said to comprise ‘promoter elements’) in nucleic acid constructs of the present invention can be native or analogous (i.e., found in the native organism such as a plant) and/or foreign or heterologous (i.e., not found in the native plant) to the plant host. Promoters can comprise a naturally occurring sequence and/or a synthetic sequence.

[0063] A given nucleic acid construct may contain more than one promoter, for example, in embodiments wherein expression of more than one heterologous gene is desired. In some embodiments, the two or more promoters include promoters that are the same. In the some embodiments, the two or more promoters are different from one another. In some embodiments that involve at least two different promoters, one promoter drives expression of a heterologous gene in cells of one species (such as a species bacterium) while one other promoter drives expression of a heterologous gene in cells of another species (such as a plant species). In some embodiments, the two or more promoters include at least two promoters that drive expression in cells of the same species.

[0064] As mentioned previously, the present invention provides in certain embodiments gene regulatory elements from poplar, which include poplar promoters capable of driving gene expression in plants, including poplar and plants other than poplar (including both monocotyledonous and dicotyledonous plants). In many embodiments, provided gene regulatory elements comprise isolated nucleic acids as described above. Nucleotide sequences of certain provided poplar gene regulatory elements are listed as SEQ ID NOs: 1 to 158. In some embodiments, the nucleotide sequence of the gene regulatory element has at least 65%, at least 70%, at least 75%, at least 80%, at least 85%, at least 90%, at least 95%, at least 96%, at least 97%, at least 98%, at least 99%, or more identity to at least one of SEQ ID NO.: 1 to 158. In some embodiments, the nucleotide sequence of the gene regulatory element has at least 65%, at least 70%, at least 75%, at least 80%, at least 85%, at least 90%, at least 95%, at least 96%, at least 97%, at least 98%, at least 99%, or more identity to at least one of SEQ ID NO:90, 94, 103, 117, 131, 137, 145, and 158. (See, e.g., Examples 2, 3, 4, and 5). In some embodiments, the nucleotide sequence of the gene regulatory element has at least 65%, at least 70%, at least 75%, at least 80%, at least 85%, at least 90%, at least 95%, at least 96%, at least 97%, at least 98%, at least 99%, or more sequence identity to at least one of SEQ ID NO: 90 and 103.

[0065] Provided gene regulatory elements can be used alone, in combination with each other, and/or in combination with known promoters (such as known plant promoters) to drive and/or facilitate expression of a gene of interest (such as a heterologous gene). For example, in embodiments wherein two heterologous gene products are expressed in the same plant or other organism, expression of one heterologous gene product may be driven and/or facilitated by a gene regulatory element from poplar provided herein, while expression of the other heterologous gene product may be driven and/or facilitated by another second gene regulatory element from poplar provided herein. Alternatively or additionally, expression of one heterologous gene product may be driven and/or facilitated by a gene regulatory element from poplar provided herein, while expression of the other heterologous gene product may be driven and/or facilitated by a known promoter such as a known plant promoter. Any number of heterologous gene products may be expressed with the aid of and/or under the control of any combinations of gene regulatory elements or promoters.

[0066] Provided gene regulatory elements include several types of plant promoters, such as constitutive plant promoters, tissue-specific promoters, and developmental-stage specific plant promoters.

[0067] In certain embodiments, at least one promoter in the nucleic acid construct is a constitutive plant promoter, i.e., an unregulated promoter that allows continual expression of a gene associated with it. Examples of known plant promoters that can be used in addition to provided gene regulatory elements include, but are not limited to, the 35S cauliflower mosaic virus (CaMV) promoter, a promoter of nopaline synthase, and a promoter of octopine synthase. Examples of other constitutive promoters used in plants are the 19S promoter and promoters from genes encoding actin and ubiquitin. Promoters may be obtained from genomic DNA by using polymerase chain reaction (PCR), and then cloned into the construct.

[0068] Constitutive promoters may allow expression of an associated gene throughout the life of an organism such as a plant. In some embodiments, the heterologous gene product is produced throughout the life of the organism. In some embodiments, the heterologous gene product is active throughout the life of the organism. Alternatively or additionally, a constitutive promoter may allow expression of an associated gene in all or a majority of tissues in the organism. In some embodiments, the heterologous gene product is present in all tissues during the life of the organism.

[0069] In certain embodiments, at least one promoter in the nucleic acid construct is a tissue-specific plant promoter, i.e., a promoter that allows expression of a gene in a specific tissue or tissues associated with it.

[0070] In certain embodiments, at least one promoter in the nucleic acid construct is a tissue-preferred plant promoter, i.e., a promoter that allows preferential expression in one or some tissues (e.g., higher in one or some tissues than in others). For example, a tissue-preferred plant promoter may allow a high level of expression in stem but a low level of expression in leaves and seed.

### 2. Genes of Interest/Heterologous Genes

[0071] The gene of interest can be any gene whose expression is desired. In a nucleic acid construct (particularly expression constructs), genes of interest are generally heterologous, i.e., they are not normally associated with the other elements in the construct in such an arrangement in nature and/or they are associated with such other elements by the hand of man. In some embodiments, heterologous gene products (which may be polypeptides and/or RNA molecules) are expressed in cells, tissues, and/or organisms in which they are not expressed in nature; and/or are expressed at levels different than they are expressed in nature.

[0072] A given nucleic acid construct may have one or more than one heterologous gene.

[0073] a. Enzyme Polypeptides

[0074] In some embodiments, the heterologous gene encodes an enzyme polypeptide. A wide variety of enzyme polypeptides may be expressed under the control of, or facilitated by, poplar gene regulatory elements provided by the present invention. A discussion of some classes of such enzyme polypeptides is presented below. The discussion below is not intended to be exhaustive; provided gene regulatory elements may be used to drive and/or facilitate expression of other enzyme polypeptides as well.

[0075] i. Lignocellulolytic Enzyme Polypeptides

[0076] In some embodiments, the heterologous gene is a lignocellulolytic enzyme polypeptide.

[0077] Plants generally comprise lignocellulosic biomass, a complex substrate in which crystalline cellulose is embedded within a matrix of hemicellulose and lignin. Lignocellulose represents approximately 90% of the dry weight of most plant material with cellulose making up between 30% to 50% of the dry weight of lignocellulose and hemicellulose making up between 20% and 50% of the dry weight of lignocellulose.

[0078] Disruption and degradation (e.g., hydrolysis) of lignocellulose by lignocellulolytic enzyme polypeptides leads to the formation of substances including monosaccharides, disaccharides, polysaccharides and phenols. In some embodiments, the lignocellulolytic enzyme polypeptide are characterized by and/or are employed under conditions and/or according to a protocol that achieves enhanced disruption and/or degradation of lignocellulose.

[0079] Lignocellulolytic enzyme polypeptides whose expression may be driven with gene regulatory elements of the invention include enzymes that are involved in the disruption and/or degradation of lignocellulose. Lignocellulolytic enzyme polypeptides include, but are not limited to, cellulases, hemicellulases and ligninases. Representative examples of lignocellulolytic enzyme polypeptides are presented in Table 1.

TABLE 1
Examples of lignocellulolytic enzyme polypeptides

| | | | GenBank |
|---|---|---|---|
| | | | Accession |
| | | | Number/ |
| Gene | Microbial | Amino Acid Sequence of Exemplary | (SEQ ID |
| name | species | Lignocellulolytic Enzyme Polypeptide | NO.) |
| E1 | Acidothermus | AGGGYWHTSGREILDANNVPVRIAGINWFGFETCNYVVHGLWSRDYRS | AAA75477 |
| | cellulolyticus | MLDQIKSLGYNTIRLPYSDDILKPGTMPNSINFYQMNQDLQGLTSLQV | (SEQ ID NO: |
| | | MDKIVAYAGQIGLRIILDRHRPDCSGQSALWYTSSVSEATWISDLQAL | 177) |
| | | AQRYKGNPTVVGFDLHNEPHDPACWGCGDPSIDWRLAAERAGNAVLSV | |
| | | NPNLLIFVEGVQSYNGDSYWWGGNLQGAGQYPVVLNVPNRLVYSAHDY | |
| | | ATSVYPQTWFSDPTFPNNMPGIWNKNWGYLFNQNIAPVWLGEFGTTLQ | |
| | | STTDQTWLKTLVQYLRPTAQYGADSFQWTFWSWNPDSGDTGGILKDDW | |
| | | QTVDTVKDGYLAPIKSSIFDPVG | |
| gux1 | Acidothermus | MGAPGLRRRLRAGIVSAAALGSLVSGLVAVAPVAHAAVTLKAQYKNND | ABK52390.1 |
| | cellulolyticus | SAPSDNQIKPGLQLVNTGSSSVDLSTVTVRYWFTRDGGSSTLVYNCDW | (SEQ ID NO: |
| | | AAMGCGNIRASFGSVNPATPTADTYLQLSFTGGTLAAGGSTGEIQNRV | 178) |
| | | NKSDWSNFDETNDYSYGTNTTFQDWTKVTVYVNGVLVWGTEPSGATAS | |
| | | PSASATPSPSSSPTTSPSSSPSPSSSPTPTPSSSSPPPSSNDPYIQRF | |
| | | LTMYNKIHDPANGYFSPQGIPYHSVETLIVEAPDYGHETTSEAYSFWL | |
| | | WLEATYGAVTGNWTPFNNAWTTMETYMIPQHADQPNNASYNPNSPASY | |
| | | APEEPLPSMYPVAIDSSVPVGHDPLAAELQSTYGTPDIYGMHWLADVD | |
| | | NIYGYGDSPGGGCELGPSAKGVSYINTFQRGSQESVWETVTQPTCDNG | |
| | | KYGGAHGYVDLFIQGSTPPQWKYTDAPDADARAVQAAYWAYTWASAQG | |
| | | KASAIAPTIAKAAKLGDYLRYSLFDKYFKQVGNCYPASSCPGATGRQS | |
| | | ETYLIGWYYAWGGSSQGWAWRIGDGAAHFGYQNPLAAWAMSNVTPLIP | |
| | | LSPTAKSDWAASLQRQLEFYQWLQSAEGAIAGGATNSWNGNYGTPPAG | |
| | | DSTFYGMAYDWEPVYHDPPSNNWFGFQAWSMERVAEYYYVTGDPKAKA | |
| | | LLDKWVAWVKPNVTTGASWSIPSNLSWSGQPDTWNPSNPGTNANLHVT | |
| | | ITSSGQDVGVAAALAKTLEYYAAKSGDTASRDLAKGLLDSIWNNDQDS | |
| | | LGVSTPETRTDYSRFTQVYDPTTGDGLYIPSGWTGTMPNGDQIKPGAT | |
| | | FLSIRSWYTKDPQWSKVQAYLNGGPAPTFNYHRFWAESDFAMANADFG | |
| | | MLFPSGSPSPTPSPTPTSSPSPTPSSSPTPSPSPSPTGDTTPPSVPTG | |
| | | LQVTGTTTSSVSLSWTASTDNVGVAHYNVYRNGTLVGQPTATSFTDTG | |
| | | LAAGTSYTYTVAAVDAAGNTSAQSSPVTATTASPSPSPSPSPTPTSSP | |
| | | SPTPSPTPSPTSTSGASCTATYVVNSDWGSGFTTTVTVTNTGTRATSG | |
| | | WTVTWSFAGNQTVTNYWNTALTQSGKSVTAKNLSYNNVIQPGQSTTFG | |
| | | FNGSYSGTNTAPTLSCTASZ | |
| XylE | Acidothermus | MGHHAMRRMVTSASVVGVATLAAATVLITGGIAHAASTLKQGAEANGR | ABK51955.1 |
| | cellulolyticus | YFGVSASVNTLNNSAAANLVATQFDMLTPENEMKWDTVESSRGSFNFG | (SEQ ID NO: |
| | | PGDQIVAFATAHNMRVRGHNLVWHSQLPGWVSSLPLSQVQSAMESHIT | 179) |
| | | AEVTHYKGKIYAWDVVNEPFDDSGNLRTDVFYQAMGAGYIADALRTAH | |
| | | AADPNAKLYLNDYNIEGINAKSDAMYNLIKQLKSQGVPIDGVGFESHF | |
| | | IVGQVPSTLQQNMQRFADLGVDVAITELDDRMPTPPSQQNLNQQATDD | |
| | | ANVVKACLAVARCVGITQWDVSDADSWVPGTFSGQGAATMFDSNLQPK | |
| | | PAFTAVLNALSASASVSPSPSPSPSPSPSPSPSPSPSPSPSPSPSPSP | |
| | | SSSPVSGGVKVQYKNNDSAPGDNQIKPGLQVVNTGSSSVDLSTVTVRY | |
| | | WFTRDGGSSTLVYNCDWAVMGCGNIRASFGSVNPATPTADTYLQLSFT | |
| | | GGTLPAGGSTGEIQSRVNKSDWSNFTETNDYSYGTNTTFQDWSKVTVY | |
| | | VNGRLVWGTEPSGTSPSPTPSPSPTPSPSPSPSPSPSPSPSPSPSPSP | |
| | | SSSPSSGCVASMRVDSSWPGGFTATVTVSNTGGVSTSGWQVGWSWPSG | |
| | | DSLVNAWNAVVSVTGTSVRAVNASYNGVIPAGGSTTFGFQANGTPGTP | |
| | | TFTCTTSADLZ | |
| aviIII | Acidothermus | MAATTQPYTWSNVAIGGGGFVDGIVFNEGAPGILYVRTDIGGMYRWDA | ABK52391.1 |
| | cellulolyticus | ANGRWIPLLDWVGWNNWGYNGVVSIAADPINTNKVWAAVGMYTNSWDP | (SEQ ID NO: |
| | | NDGAILRSSDQGATWQITPLPFKLGGNMPGRGMGERLAVDPNNDNILY | 180) |
| | | FGAPSGKGLWRSTDSGATWSQMTNFPDVGTYIANPTDTTGYQSDIQGV | |
| | | VWVAFDKSSSSLGQASKTIFVGVADPNNPVFWSRDGGATWQAVPGAPT | |
| | | GFIPHKGVFDPVNHVLYIATSNTGGPYDGSSGDVWKFSVTSGTWTRIS | |
| | | PVPSTDTANDYFGYSGLTIDRQHPNTIMVATQISWWPDTIIFRSTDGG | |
| | | ATWTRIWDWTSYPNRSLRYVLDISAEPWLTFGVQPNPPVPSPKLGWMD | |
| | | EAMAIDPFNSDRMLYGTGATLYATNDLTKWDSGGQIHIAPMVKGLEET | |
| | | AVNDLISPPSGAPLISALGDLGGFTHADVTAVPSTIFTSPVFTTGTSV | |
| | | DYAELNPSIIVRAGSFDPSSQPNDRHVAFSTDGGKNWFQGSEPGGVTT | |
| | | GGTVAASADGSRFVWAPGDPGQPVVYAVGFGNSWAASQGVPANAQIRS | |
| | | DRVNPKTFYALSNGTFYRSTDGGVTFQPVAAGLPSSGAVGVMFHAVPG | |
| | | KEGDLWLAASSGLYHSTNGGSSWSAITGVSSAVNVGFGKSAPGSSYPA | |
| | | VFVVGTIGGVTGAYRSDDGGTTWVRINDDQHQYGNWGQAITGDPRIYG | |
| | | RVYIGTNGRGIVYGDIAGAPSGSPSPSVSPSASPSLSPSPSPSSSPSP | |
| | | SPSPSSSPSSSPSPSPSPSPSPSRSPSPSASPSPSSSPSPSSSPSSSP | |
| | | SPTPSSSPVSGGVKVQYKNNDSAPGDNQIKPGLQVVNTGSSSVDLSTV | |
| | | TVRYWFTRDGGSSTLVYNCDWAAIGCGNIRASFGSVNPATPTADTYLQ | |
| | | LSFTGGTLAAGGSTGEIQNRVNKSDWSNFTETNDYSYGTNTVFQDWSK | |
| | | VTVYVNGRLVWGTEPSGTSPSPTPSPSPTPSPSPSPSPGGDVTPPSVP | |
| | | TGVVVTGVSGSSVSLAWNASTDNVGVAHYNVYRNGVLVGQPTVTSFTD | |
| | | TGLAAGTAYTYTVAAVDAAGNTSAPSTPVTATTTSPSPSPSPTPSPTP | |
| | | SPTPSPSPSPSLSPSPSPSPSPSPSPSLSPSPSTSPSPSPSPTPSPSS | |
| | | SGVGCRATYVVNSDWGSGFTATVTVTNTGSRATSGWTVAWSFGGNQTV | |
| | | TNYWNTLLTQSGASVTATNLSYNNVIQPGQSTTFGFNATYAGTNTPPT | |
| | | PTCTTNSD | |
| cbhE | Talaromyces | MDPQQAGTATAENHPPLTWQECTAPGSCTTQNGAVVLDANWRWVHDVN | AAL33602.2 |
| | emersonii | GYTNCYTGNTWDPTYCPDDETCAQNCALDGADYEGTYGVTSSGSSLKL | (SEQ ID NO: |
| | | NFVTGSNVGSRLYLLQDDSTYQIFKLLNREFSFDVDVSNLPCGLNGAL | 181) |
| | | YFVAMDADGGVSKYPNNKAGAKYGTGYCDSQCPRDLKFIDGEANVEGW | |
| | | QPSSNNANTGIGDHGSCCAEMDVWEANSISNAVTPHPCDTPGQTMCSG | |
| | | DDCGGTYSNDRYAGTCDPDGCDFNPYRMGNTSFYGPGKIIDTTKPFTV | |
| | | VTQFLTDDGTDTGTLSEIKRFYIQNSNVIPQPNSDISGVTGNSITTEF | |
| | | CTAQKQAFGDTDDFSQHGGLAKMGAAMQQGMVLVMSLDDYAAQMLWLD | |
| | | SDYPTDADPTTPGIARGTCPTDSGVPSDVESQSPNSYVTYSNIKFGPI | |
| | | NSTFTASGD | |

[0080] A—Cellulases

[0081] Cellulases are lignocellulolytic enzyme polypeptides involved in cellulose degradation. Cellulase enzyme polypeptides are classified on the basis of their mode of action. There are two basic kinds of cellulases: the endocellulases, which cleave the polymer chains internally; and the exocellulases, which cleave from the reducing and non-reducing ends of molecules generated by the action of endocellulases. Cellulases include cellobiohydrolases, endoglucanases, and β-D-glucosidases. Endoglucanases randomly attack the amorphous regions of cellulose substrate, yielding mainly higher oligomers. Cellulobiohydrolases are exocellulases which hydrolyze crystalline cellulose and release cellobiose (glucose dimer). Both types of enzymes hydrolyze β-1,4-glycosidic bonds. β-D glucosidases or cellulobiase converts oligosaccharides and cellubiose to glucose. Beta-glucan glucohydrolase hydrolyzes oligosaccharides to glucose.

[0082] According to the present invention, the heterologous gene may encode a cellulase enzyme polypeptide. Transgenic plants of the invention may be engineered to comprise one or more than one gene encoding a cellulase enzyme polypeptide. For example, plants may be engineered to comprise one or more genes encoding a cellulase of the cellubiohydrolase class, one or more genes encoding a cellulase of the endoglucanase class, and/or one or more genes encoding a cellulase of the 13-D glucosidase class.

[0083] Examples of endoglucanase genes that can be used in the present invention include those that can be obtained from Aspergillus aculeatus (U.S. Pat. No. 6,623,949; WO 94/14953), Aspergillus kawachii (U.S. Pat. No. 6,623,949), Aspergillus oryzae (Kitamoto et al., Appl. Microbiol. Biotechnol., 1996, 46: 538-544; U.S. Pat. No. 6,635,465), Aspergillus nidulans (Lockington et al., Fungal Genet. Biol., 2002, 37: 190-196), Cellulomonas fimi (Wong et al., Gene, 1986, 44: 315-324), Bacillus subtilis (MacKay et al., Nucleic Acids Res., 1986, 14: 9159-9170), Cellulomonas pachnodae (Cazemier et al., Appl. Microbiol. Biotechnol., 1999, 52: 232-239), Fusarium equiseti (Goedegebuur et al., Curr. Genet., 2002, 41: 89-98), Fusarium oxysporum (Hagen et al., Gene, 1994, 150: 163-167; Sheppard et al., Gene, 1994, 150: 163-167), Humicola insolens (U.S. Pat. No. 5,912,157; Davies et al., Biochem J., 2000, 348: 201-207), Hypocrea jecorina (Penttila et al., Gene, 1986, 45: 253-263), Humicola grisea (Goedegebuur et al., Curr. Genet., 2002, 41: 89-98), Micromonospora cellulolyticum (Lin et al., J. Ind. Microbiol., 1994, 13: 344-350), Myceliophthora thermophila (U.S. Pat. No. 5,912,157), Rhizopus oryzae (Moriya et al., J. Bacteriol., 2003, 185: 1749-1756), Trichoderma reesei (Saloheimo et al., Mol. Microbiol., 1994, 13: 219-228), and Trichoderma viride (Kwon et al., Biosci. Biotechnol. Biochem., 1999, 63: 1714-1720; Goedegebuur et al., Curr. Genet., 2002, 41: 89-98).

[0084] In certain embodiments, the heterologous gene encodes the endo-1,4-β-glucanase E1 gene (GenBank Accession No. U33212, See Table 1). This gene was isolated from the thermophilic bacterium Acidothermus cellulolyticus. Acidothermus cellulolyticus has been characterized with the ability to hydrolyze and degrade plant cellulose. The cellulase complex produced by A. cellulolyticus is known to contain several different thermostable cellulase enzymes with maximal activities at temperatures of 75° C. to 83° C. These cellulases are resistant to inhibition from cellobiose, an end product of the reactions catalyzed by endo- and exo-cellulases.

[0085] The E1 endo-1,4-β-glucanase is described in detail in U.S. Pat. No. 5,275,944. This endoglucanase demonstrates a temperature optimum of 83° C. and a specific activity of 40 μmol glucose release from carboxymethylcellulose/min/mg protein. This E1 endoglucanase was further identified as having an isoelectric pH of 6.7 and a molecular weight of 81,000 Daltons by SDS polyacrylamide gel electrophoresis. It is synthesized as a precursor with a signal peptide that directs it to the export pathway in bacteria. The mature enzyme polypeptide is 521 amino acids (aa) in length. The crystal structure of the catalytic domain of about 40 kD (358 aa) has been described (J. Sakon et al., Biochem., 1996, 35: 10648-10660). Its pro/thr/ser-rich linker is 60 aa, and the cellulose binding domain (CBD) is 104 aa. The properties of the cellulose binding domain that confer its function are not well-characterized. Plant expression of the E1 gene has been reported (see for example, M. T. Ziegler et al., Mol. Breeding, 2000, 6: 37-46; Z. Dai et al., Mol. Breeding, 2000, 6: 277-285; Z. Dai et al., Transg. Res., 2000, 9: 43-54; and T. Ziegelhoffer et al., Mol. Breeding, 2001, 8: 147-158).

[0086] Examples of cellobiohydrolase genes that can be used in the present invention can be obtained from Acidothermus cellulolyticus, Acremonium cellulolyticus (U.S. Pat. No. 6,127,160), Agaricus bisporus (Chow et al., Appl. Environ. Microbiol., 1994, 60: 2779-2785), Aspergillus aculeatus (Takada et al., J. Ferment. Bioeng., 1998, 85: 1-9), Aspergillus niger (Gielkens et al., Appl. Environ. Microbiol., 65: 1999, 4340-4345), Aspergillus oryzae (Kitamoto et al., Appl. Microbiol. Biotechnol., 1996, 46: 538-544), Athelia rolfsii (EMBL accession No. AB103461), Chaetomium thermophilum (EMBL accession Nos. AX657571 and CQ838150), Cullulomonas fimi (Meinke et al., Mol. Microbiol., 1994, 12: 413-422), Emericella nidulans (Lockington et al., Fungal Genet. Biol., 2002, 37: 190-196), Fusarium oxysporum (Hagen et al., Gene, 1994, 150: 163-167), Geotrichum sp. 128 (EMBL accession No. AB089343), Humicola grisea (de Oliviera and Radford, Nucleic Acids Res., 1990, 18: 668; Takashima et al., J. Biochem., 1998, 124: 717-725), Humicola nigrescens (EMBL accession No. AX657571), Hypocrea koningii (Teeri et al., Gene, 1987, 51: 43-52), Mycelioptera thermophila (EMBL accession No. AX657599), Neocallimastix patriciarum (Denman et al., Appl. Environ. Microbiol., 1996, 62: 1889-1896), Phanerochaete chrysosporium (Tempelaars et al., Appl. Environ. Microbiol., 1994, 60: 4387-4393), Thermobifida fusca (Zhang, Biochemistry, 1995, 34: 3386-3395), Trichoderma reesei (Terri et al., BioTechnology, 1983, 1: 696-699; Chen et al., BioTechnology, 1987, 5: 274-278), and Trichoderma viride (EMBL accession Nos. A4368686 and A4368688).

[0087] Examples of β-D-glucosidase genes that can be used in the present invention can be obtained from Aspergillus aculeatus (Kawaguchi et al., Gene, 1996, 173: 287-288), Aspergillus kawachi (Iwashita et al., Appl. Environ. Microbiol., 1999, 65: 5546-5553), Aspergillus oryzae (WO 2002/095014), Cellulomonas biazotea (Wong et al., Gene, 1998, 207: 79-86), Penicillium funiculosum (WO 200478919), Saccharomycopsis fibuligera (Machida et al., Appl. Environ. Microbiol., 1988, 54: 3147-3155), Schizosaccharomyces pombe (Wood et al., Nature, 2002, 415: 871-880), and Trichoderma reesei (Barnett et al., BioTechnology, 1991, 9: 562-567).

[0088] Other examples of cellulases that can be used in accordance with the present invention include family 48 glycoside hydrolases such as gux1 from Acidothermus cellulolyticus, avicelases such as aviIII from Acidothermus cellulolyticus, and cbhE from Talaromyces emersonii. (See Table 1.)

[0089] Transgene expression of cellulases in plants for the conversion of cellulose to glucose has been reported (see, for example, Y. Jin Cai et al., Appl. Environ. Microbiol., 1999, 65: 553-559; C. R. Sanchez et al., Revista de Microbiologica, 1999, 30: 310-314; R. Cohen et al., Appl. Environ., 2995, 71: 2412-2417; Z. Dai et al., Transg. Res., 2005, 14: 627-543).

[0090] B—Hemicellulases

[0091] Hemicellulases are lignocellulolytic enzyme polypeptides that are involved in hemicellulose degradation. Hemicellulases include xylanases, arabinofuranosidases, acetyl xylan esterases, ferulic acid esterases, xyloglucanases, β-glucanases, β-xylosidases, glucuronidases, mannanases, galactanases, and arabinases. Similar to cellulase enzyme polypeptides, hemicellulases are classified on the basis of their mode of action: the endo-acting hemicellulases attack internal bonds within the polysaccharide chain; the exo-acting hemicellulases act progressively from either the reducing or non-reducing end of polysaccharide chains.

[0092] According to the present invention, heterologous genes may encode a hemicellulase enzyme polypeptide. Transgenic plants of the invention may be engineered to comprise one or more than one gene encoding a hemicellulase enzyme polypeptide. For example, plants may be engineered to comprise one or more genes encoding a hemicellulase of the xylanase class, one or more genes encoding a hemicellulase of the arabinofuranosidase class, one or more genes encoding a hemicellulase of the acetyl xylan esterase class, one or more genes encoding a hemicellulase of the glucuronidase class, one or more genes encoding a hemicellulase of the mannanase class, one or more genes encoding a hemicellulase of the galactanase class, and/or one or more genes encoding a hemicellulase of the arabinase class.

[0093] Examples of endo-acting hemicellulases include endoarabinanase, endoarabinogalactanase, endoglucanase, endomannanase, endoxylanase, and feraxan endoxylanase. Examples of exo-acting hemicellulases include α-L-arabinosidase, β-L-arabinosidase, α-1,2-L-fucosidase, α-D-galactosidase, β-D-galactosidase, β-D-glucosidase, β-D-glucuronidase, β-D-mannosidase, β-D-xylosidase, exo-glucosidase, exo-mannobiohydrolase, exo-mannanase, exo-xylanase, xylan α-glucuronidase, and coniferin β-glucosidase.

[0094] Hemicellulase genes can be obtained from any suitable source, including fungal and bacterial organisms, such as Aspergillus, Disporotrichum, Penicillium, Neurospora, Fusarium, Trichoderma, Humicola, Thermomyces, and Bacillus. Examples of hemicellulases that can be used in the present invention can be obtained from Acidothermus cellulolyticus, Acidobacterium capsulatum (Inagaki et al., Biosci. Biotechnol. Biochem., 1998, 62: 1061-1067), Agaricus bisporus (De Groot et al., J. Mol. Biol., 1998, 277: 273-284), Aspergillus aculeatus (U.S. Pat. No. 6,197,564; U.S. Pat. No. 5,693,518), Aspergillus kawachii (Ito et al., Biosci. Biotechnol. Biochem., 1992, 56: 906-912), Aspergillus niger (EMBL accession No. AF108944), Magnaporthe grisea (Wu et al., Mol. Plant. Microbe Interact., 1995, 8: 506-514), Penicillium chrysogenum (Haas et al., Gene, 1993, 126: 237-242), Talaromyces emersonii (WO 02/24926), and Trichoderma reesei (EMBL accession Nos. X69573, X69574, and AY281369).

[0095] In certain embodiments, the heterologous gene comprises the A. cellulolyticus endoxylanase xylE.

[0096] C—Ligninases

[0097] Ligninases are lignocellulolytic enzyme polypeptides that are involved in the degradation of lignin. Lignin-degrading enzyme polypeptides include, but are not limited to, lignin peroxidases, manganese-dependent peroxidases, hybrid peroxidases (which exhibit combined properties of lignin peroxidases and manganese-dependent peroxidases), and laccases. Hydrogen peroxide, required as co-substrate by the peroxidases, can be generated by glucose oxidase, aryl alcohol oxidase, and/or lignin peroxidase-activated glyoxal oxidase.

[0098] According to the present invention, heterologous genes may encode a ligninase enzyme polypeptide. Transgenic plants of the invention may be engineered to comprise one or more than one gene encoding a ligninase enzyme polypeptide. For example, plants may be engineered to comprise one or more genes encoding a ligninase of the lignin peroxidase class, one or more genes encoding a ligninase of the manganese-dependent peroxidase class, one or more genes encoding a ligninase of the hybrid peroxidase class, and/or one or more genes encoding a ligninase of the laccase class.

[0099] Lignin-degrading genes may be obtained from Acidothermus cellulolyticus, Bjerkandera adusta, Ceriporiopsis subvermispora (see WO 02/079400), Coprinus cinereus, Coriolus hirsutus, Humicola insolens, Humicola lanuginosa, Mucor miehei, Myceliophthora thermophila, Neurospora crassa, Penicillium purpurogenum, Phanerochaete chrysosporium, Phlebia radiata, Pleurotus eryngii, Thielavia terrestris, Trametes villosa, Trametes versicolor, Trichoderma harzianum, Trichoderma koningii, Trichoderma longibrachiatum, Trichoderma reesei, or Trichoderma viride.

[0100] Examples of genes encoding ligninases that can be used in the invention can be obtained from Bjerkandera adusta (WO 2001/098469), Ceriporiopsis subvermispora (Conesa et al., J. Biotechnol., 2002, 93: 143-158), Cantharellus cibariusi (Ng et al., Biochem. and Biophys. Res. Comm., 2004, 313: 37-41), Coprinus cinereus (WO 97/008325; Conesa et al., J. Biotechnol., 2002, 93: 143-158), Lentinula edodes (Nagai et al., Applied Microbiol. and Biotechnol., 2002, 60: 327-335, 2002), Melanocarpus albomyces (Kiiskinen et al., FEBS Letters, 2004, 576: 251-255, 2004), Myceliophthora thermophila (WO 95/006815), Phanerochaete chrysosporium (Conesa et al., J. Biotechnol., 2002, 93: 143-158; Martinez, Enz, Microb, Technol, 2002, 30: 425-444), Phlebia radiata (Conesa et al., J. Biotechnol., 2002, 93: 143-158), Pleurotus eryngii (Conesa et al., J. Biotechnol., 2002, 93: 143-158), Polyporus pinsitus (WO 96/000290), Rigidoporus lignosus (Garavaglia et al., J. of Mol. Biol., 2004, 342: 1519-1531), Rhizoctonia solani (WO 96/007988), Scytalidium thermophilum (WO 95/033837), Tricholoma giganteum (Wang et al., Biochem. Biophys. Res. Comm., 2004, 315: 450-454), and Trametes versicolor (Conesa et al., J. Biotechnol., 2002, 93: 143-158).

[0101] For example, transgenic plants of the invention may be engineered to comprise one or more lignin peroxidases. Genes encoding lignin peroxidases may be obtained from Phanerochaete chrysosporium or Phlebia radiata. Lignin-peroxidases are glycosylated heme proteins (MW 38 to 46 kDa) which are dependent on hydrogen peroxide for activity and catalyze the oxidative cleavage of lignin polymer. At least six (6) heme proteins (H1, H2, H6, H7, H8 and H10) with lignin peroxidase activity have been identified Phanerochaete chrysosporium in strain BKMF-1767. In certain embodiments, plants are engineered to comprise the white rot filamentous Phanerochaete chrysosporium ligninase (CGLS) (H. A. de Boer et al., Gene, 1988, 69(2): 369) (see the Examples section).

[0102] D—Other Lignocellulolytic Enzyme Polypeptides

[0103] In addition to cellulases, hemicellulases and ligninases, lignocellulolytic enzyme polypeptides that can be used in the practice of the present invention also include enzymes that degrade pectic substances or phenolic acids such as ferulic acid. Pectic substances are composed of homogalacturonan (or pectin), rhamno-galacturonan, and xylogalacturonan. Enzymes that degrade homogalacturonan include pectate lyase, pectin lyase, polygalacturonase, pectin acetyl esterase, and pectin methyl esterase. Enzymes that degrade rhamnogalacturonan include alpha-arabinofuranosidase, beta-galactosidase, galactanase, arabinanase, alpha-arabinofuranosidase, rhamnogalacturonase, rhamnogalacturonan lyase, and rhamnogalacturonan acetyl esterase. Enzymes that degrade xylogalacturonan include xylogalacturonosidase, xylogalacturonase, and rhamnogalacturonan lyase.

[0104] Phenolic acids include ferulic acid, which functions in the plant cell wall to cross-link cell wall components together. For example, ferulic acid may cross-link lignin to hemicellulose, cellulose to lignin, and/or hemicellulose polymers to each other. Ferulic acid esterases cleave ferulic acid, disrupting the cross linkages.

[0105] Other enzymes that may enhance or promote lignocellulose disruption and/or degradation may be expressed under the control of a gene regulatory element provided in the present disclosure and include, but are not limited to, amylases (e.g., alpha amylase and glucoamylase), esterases, lipases, phospholipases, phytases, proteases, and peroxidases.

[0106] E—Combinations of Lignocellulolytic Enzyme Polypeptides

[0107] According to the present invention, heterologous genes may encode a lignocellulolytic enzyme polypeptide, e.g., a cellulase enzyme polypeptide, a hemicellulase enzyme polypeptide, or a ligninase enzyme polypeptide. Transgenic plants of the invention may be engineered to comprise one or more than one gene encoding lignocellulolytic enzyme polypeptides, e.g., enzymes from different classes of cellulases, enzymes from different classes of hemicellulases, enzymes from different classes of ligninases, or any combinations thereof. For example, combinations of genes may be selected to provide efficient degradation of one component of lignocellulose (e.g., cellulose, hemicellulose, or lignin). Alternatively, combinations of genes may be selected to provide efficient degradation of the lignocellulosic material.

[0108] In certain embodiments, genes are optimized for the substrate (e.g., cellulose, hemicellulase, lignin or whole lignocellulosic material) in a particular plant (e.g., corn, tobacco, switchgrass). Tissue from one plant species is likely to be physically and/or chemically different from tissue from another plant species. Selection of genes or combinations of genes to achieve efficient degradation of a given plant tissue is within the skill of artisans in the art.

[0109] In some embodiments, combinations of genes are selected to provide for synergistic enzyme activity (i.e., genes are selected such that the interaction between distinguishable enzyme polypeptides or enzyme activities results in the total activity of the enzymes taken together being greater than the sum of the effects of the individual activities).

[0110] Efficient lignocellulolytic activity may be achieved by production of two or more enzyme polypeptides in a single transgenic plant. As mentioned above, plants may be transformed to express more than one enzyme polypeptide, for example, by employing the use of multiple gene constructs encoding each of the selected enzymes or a single construct comprising multiple nucleotide sequences encoding each of the selected enzymes. Alternatively, individual transgenic plants, each stably transformed to express a given enzyme, may be crossed by methods known in the art (e.g., pollination, hand detassling, cytoplasmic male sterility, and the like) to obtain a resulting plant that can produce all the enzymes of the individual starting plants.

[0111] Alternatively or additionally, efficient lignocellulolytic activity may be achieved by production of two or more lignocellulolytic enzyme polypeptides in separate plants. For example, three separate lines of plants (e.g., corn), one expressing one or more enzymes of the cellulase class, another expressing one or more enzymes of the hemicellulase class and the third one expressing one or more enzymes of the ligninase class, may be developed and grown simultaneously. The desired “blend” of enzymes produced may be achieved by simply changing the seed ratio, taking into account farm climate and soil type, which are expected to influence enzyme yields in plants.

[0112] Other advantages of this approach include, but are not limited to, increased plant health (which is known to be adversely affected as the number of introduced genes increases), simpler transformations procedures and great flexibility in incorporating the desired traits in commercial plant varieties for large-scale production.

[0113] G—Thermophilic and Thermostable Enzyme Polypeptides

[0114] It may be sometimes desirable to expressing thermophilic and/or thermostable enzyme polypeptides. Gene regulatory elements provided by the present invention may be used to drive and/or facilitate expression of genes encoding such polypeptides as well. For example, enzyme polypeptides whose optimal range of temperature for activity (thermophilic enzyme polypeptides) may be expressed in transgenic plants in accordance with the invention. Without wishing to be bound by any particular theory, the limited activity or absence of activity during growth of the plant (at moderate or low temperatures, at which the enzyme polypeptide is less active) may be beneficial to the health of the plant. Alternatively or additionally, and without wishing to be bound by any particular theory, such enzyme polypeptides may facilitate increased hydrolysis because of their high activity at high temperature conditions commonly used in the processing of cellulosic biomass.

[0115] In some embodiments, the present invention provides a transgenic plant, the genome of which is augmented with a recombinant polynucleotide encoding at least one lignocellulolytic enzyme polypeptide that exhibits low activity at a temperature below about 60° C., below about 50° C., below about 40° C., or below about 30° C. In some embodiments, the present invention provides a transgenic plant, the genome of which is augmented with a recombinant polynucleotide encoding at least one lignocellulolytic enzyme polypeptide that exhibits high activity at a temperature above about 50° C., above about 60° C., above about 70° C., above about 80° C., or above about 90° C.

[0116] In some embodiments, the present invention provides a transgenic plant, the genome of which is augmented with a recombinant polynucleotide encoding at least one lignocellulolytic enzyme polypeptide that is or is homologous to a lignocellulolytic enzyme polypeptide found in a thermophilic microorganism (e.g., bacterium, fungus, etc.). In some such embodiments, the thermophilic organism is a bacterium that is a member of a genus selected from the group consisting of Aeropyrum, Acidilobus, Acidothermus, Aciduliprofundum, Anaerocellum, Archaeoglobus, Aspergillus, Bacillus, Caldibacillus, Caldicellulosiruptor, Caldithrix, Cellulomonas, Chaetomium, Chloroflexus, Clostridium, Cyanidium, Deferribacter, Desulfotomaculum, Desulfurella, Desulfurococcus, Fervidobacterium, Geobacillus, Geothermobacterium, Humicola, Ignicoccus, Marinitoga, Methanocaldococcus, Methanococcus, Methanopyrus, Methanosarcina, Methanothermobacter, Nautilia, Pyrobaculum, Pyrococcus, Pyrodictium, Rhizomucor, Rhodothermus, Staphylothermus, Scylatidium, Spirochaeta, Sulfolobus, Talaromyces, Thermoascus, Thermobifida, Thermococcus, Thermodesulfobacterium, Thermodesulfovibrio, Thermomicrobium, Thermoplasma, Thermoproteus, Thermothrix, Thermotoga, Thermus, and Thiobacillus; in some such embodiments, the thermophilic microorganism is a bacterium that is a member of a species selected from the group consisting of Acidothermus cellulolyticus, Pyrococcus furiosus, and Talaromyces emersonii.

[0117] ii. Cell Wall-Modifying Enzyme Polypeptides

[0118] In some embodiments, the heterologous gene (whose expression is driven by a provided gene regulatory element) encodes a cell wall-modifying enzyme polypeptide described in U.S. patent application Ser. No. 12/476,247 (filed on Jun. 1, 2009), the contents of which are herein incorporated by reference in their entirety. In some embodiments, cell wall-modifying enzyme polypeptides are lignocelluloytic enzyme polypeptides.

[0119] Cell wall-modifying enzyme polypeptides useful in accordance with the present invention include those having at least 50%, 60%, 70%, 80% or more overall sequence identity with a polypeptide whose amino acid sequence is set forth in Table 1 of U.S. patent application Ser. No. 12/476,247. Alternatively or additionally, in some embodiments, cell wall-modifying enzyme polypeptide shows at least 90%, 95%, 96%, 97%, 98%, 99%, or greater identity with at least one sequence element found in a polypeptide whose amino acid sequence is set forth in Table 1 of U.S. patent application Ser. No. 12/476,247, which sequence element is at least 4, 5, 6, 7, 8, 9, 10, 11, 12, 13, 14, 15, 16, 17, 18, 19, 20 or more amino acids long.

[0120] A variety of organisms produce cell wall-modifying enzyme polypeptides. Cell wall-modifying enzyme polypeptides may have, for example, archaeal, fungal, insect, animal, or plant origins.

[0121] In some embodiments, the cell wall-modifying enzyme polypeptide has cellulase activity. In some embodmients, the cell wall-modifying enzyme polypeptide has an activity selected from the group consisting of feruloyl esterase (also known as ferulic acid esterase), xylanase, alpha-L-arabinofuranosidase, endogalactanase, acetylxylan esterase, beta-xylosidase, xyloglucanase, glucuronoyl esterase, endo-1,5-alpha-L-arabinosidase, pectin methylesterase, endopolygalacturonase, exopolygalacturonase, pectin lyase, pectate lyase, rhamnogalacturonan lyase, pectin acetylesterase, alpha-L-rhamnosidase, mannanase, exoglucanase, glucan glycohydrolase, licheninase, laminarinase, beta-(1,3)-(1,4)-glucanase and beta-glucosidase activity. Such activities may be similar to that of other enzyme polypeptides, including those known in the art that are classified by an EC class and/or listed in enzyme databases (such as CaZY, www.cazy.org, which lists carbohydrate-active enzymes).

[0122] In some embodiments, the cell wall-modifying enzyme polypeptide modifies a plant cell wall component. In many such embodiments, the cell wall-modifying enzyme polypeptide modifies the plant cell wall component in such a way that the plant biomass is more amenable to processing steps (e.g., enzymatic digestion). For example, cell wall-modifying enzyme polypeptides may modify plant cell wall components in such a way as to allow increased digestability, increased hydrolysis, and/or increased sugar yields.

[0123] In some embodiments, modifying comprises cleavage and/or hydrolysis of the plant cell wall component. Examples of plant cell wall components that may be modified include, but are not limited to, xylans, xylan side chains, glucuronoarabinoxylans, xyloglucans, mixed-linkage glucans, pectins, pectates, rhamnogalacturonans, rhamnogalacturonan side chains, lignin, cellulose, mannans, galactans, arabinans, oligosaccharides derived from cell wall polysaccharides, and combinations thereof.

[0124] In some embodiments, the cell wall-modifying enzyme polypeptide disrupts an interaction in the plant biomass such as a covalent linkage, an ionic bonding interaction, a hydrogen bonding interaction, or a combination thereof. Examples of linkages that may be disrupted include, but are not limited to, hemicellulose-cellulose-lignin, hemicellulose-cellulose-pectin, hemicellulose-diferululate-hemicellulose, hemicellulose-ferulate-lignin, mixed beta-D-glucan-cellulose, mixed-beta-D-glucan-hemicellulose, pectin-ferulate-lignin linkages, and combinations thereof. In some embodiments, disrupting comprises hydrolyzing a linkage, such as a feruloyl ester linkage.

[0125] b. Heterologous Gene Products Conferring Resistance to Pests, Disease, and Environmental Stress

[0126] Heterologous genes may express products that confer benefits) to the transgenic plant such as herbicide resistance, insect resistance, disease resistance, resistance against parasites, and/or increased tolerance to environmental stress (e.g., drought).

[0127] Herbicide Resistance

[0128] A number of gene products are known in the art that can confer resistance to herbicides. For example, glyphosate (N-(phosphonomethyl) glycine) is a broad-spectrum systemic herbicide and the active ingredient of ROUNDUP™ formulations. Glyphosate acts by inhibiting 5-enolpyruvoyl-shikimate-3-phosphate synthetase (EPSPS) (encoded in some organisms by the aroA gene), starving the affected cells for aromatic amino acids. Some micro-organisms have a mutant form of EPSPS that is resistant to glyphosate inhibition, and this form of the enzyme can be used to impart glyphosate resistance.

[0129] As a further example, the herbicide bromoxynil (marketed as Buctril) is applied post-emergence to kill broadleaf weeds, and works by inhibiting photosynthesis in plants. Bromoxynil nitrilase (BXN), a gene from the bacterium Klebsiella pneumoniae, detoxifies bromoxynil in genetically engineered plants and therefore can confer resistance to herbicides.

[0130] The L-isomer of phosphinothricin (PPT, glufosinate ammonium) is the active ingredient of several commercial broad spectrum herbicide formulation. An analogue of L-glutamic acid, PPT, is a competitive inhibitor of glutamine synthetase, the only enzyme that can catalyze assimilation of ammonia into glutamic acid into plants. Inhibition of glutamine synthetase ultimately results in the accumulation of toxic ammonia levels, resulting in plant cell death. Phosphosphinothricin acetyltransferase, which is encoded by the bar gene from Streptomyces hygroscopicus, confers resistance to herbicides that contain PPT.

[0131] Dalapon is an herbicide used to control grasses in a wide variety of crops. Dalapon dehalogenase is capable of degrading high concentrations of the herbicide dalapon.

[0132] Additional non-limiting examples of genes that provide resistance to herbicides include, but are not limited to, mutant genes that confer resistance to imidazalinone or sulfonylurea, such as genes encoding mutant form of acetohydroxyacid synthase (AHAS), also known as acetolactate synthase (ALS) (Lee at al., EMBO J., 1988, 7: 1241; Miki et al., Theor. Appl. Genet., 1990, 80: 449; and U.S. Pat. No. 5,773,702); and genes that confer resistance to phenoxy propionic acids and cyclohexones such as the ACCAse inhibitor-encoding genes (Marshall et al., Theor. Appl. Genet., 1992, 83: 435).

[0133] Resistance to Pests and/or Diseases

[0134] Genes that confer resistance to pests and/or disease include, but are not limited to, genes whose products confer resistance to infestation from an organism selected from the group consisting of insects, bacteria, fungi, and nematodes. Heterologous genes whose products confer resistance to viruses may also be expressed using gene regulatory elements of the present invention.

[0135] Gene products that can confer resistance to insects and/or insect disease include, but are not limited to, Bt (Bacillus thuringiensis) proteins (such as delta-endotoxin (U.S. Pat. No. 6,100,456)); vitamin-binding proteins such as avidin and avidin homologs (which can be used as larvicides against insect pests); insect-specific hormones or pheromones such as ecdysteroid and juvenile hormone, and variants thereof, mimetics based thereon, or an antagonists or agonists thereof; insect-specific peptides or neuropeptides which, upon expression, disrupts the physiology of the pest; insect-specific venom such as that produced by a wasp, snake, etc.; enzyme polypeptides responsible for the accumulation of monoterpenes, sesquiterpenes, asteroid, hydroxamic acid, phenylpropanoid derivative or other non-protein molecule with insecticidal activity; insect-specific antibodies or antitoxins (Tavladoraki et al., Nature, 1993, 366: 469); and TcdA protein (Liu et al., 2003 Nature Biotechnology 21: 1222-1228).

[0136] Gene products that can confer resistance to bacteria and/or bacterial diseases include, but are not limited to, nucleotide-binding-sequence LRR (also known as ‘NBS-leucine rich repeat’) proteins (Van Der Biezen and Jones, 1998 Trends in Biochemical Sciences 23: 454-456).

[0137] Gene products that can confer resistance to fungi and/or fungal diseases include, but are not limited to, Pi-ta (U.S. Pat. No. 6,743,969), Pathogenesis-related (PR) proteins, chitinases and β-1,3-glucanases, ribosome-inactivating proteins (RIPs), thionins, hydrophobic moment peptides (such as derivatives of Tachyplesin which inhibit fungal pathogens), and antifungal peptides such as LCI.

[0138] Gene products that can confer resistance to viruses and/or viral diseases include, but are not limited to, nucleotide-binding site-leucine-rich repeat (NBS-LRR proteins), virus-specific antibodies and antitoxins (Tavladoraki et al., Nature, 1993, 366: 469), viral invasive proteins or complex toxins derived therefrom (Beachy et al., Ann. Rev. Phytopathol., 1990, 28: 451), PR proteins, and Rx proteins (genetically engineered cross protection is conferred by expressing viral coat protein genes in the plant genome).

[0139] Gene products that can confer resistance to nematodes and/or nematode diseases include, but are not limited to, peroxidases, chitinases, lipoxygenases, proteinase inhibitors, Mi proteins, Gro, Gpa and Cre proteins.

[0140] Other gene products that can confer resistances to diseases or pests include, but are not limited to, lectins (Van Damme et al., Plant Mol. Biol., 1994, 24: 825); protease or amylase inhibitors, such as the rice cysteine proteinase inhibitor (Abe et al., J. Biol. Chem., 1987, 262: 16793) and the tobacco proteinase inhibitor I (Hubb et al., Plant Mol. Biol., 1993, 21: 985); enzyme polypeptides involved in the modification of a biologically active molecule (U.S. Pat. No. 5,539,095); peptides that stimulate signal transduction; membrane permeases (channel formers or channel blockers) (Jaynes et al., Plant Sci., 1993, 89: 43); and developmental-arrestive proteins produced by a plant, pathogen or parasite that prevents disease.

[0141] Resistance to Stress

[0142] Gene products that confer resistance to environmental stress include both biotic and abiotic stress proteins.

[0143] Biotic stress in plants can be caused by bacteria, fungi, viruses, insects and nematodes. Non-limiting examples of proteins that can provide biotic stress resistance/tolerance in plants include those that confer resistance to diseases and pests mentioned above, as well as DREB transcription factors (Agarwal et al., 2006 Plant Cell Reports 25: 1263-1274) and MAP Kinases (U.S. Pat. No. 7,345,219).

[0144] Abiotic stress in plants can be caused by a variety of factors, including, but not limited to, nutrient imbalances, light (high light, UV, darkness), water imbalances (deficit, desiccation, flooding), temperature imbalances (frost, cold, heat), oxidation stress, hypoxia, physical factors (such as wind and touch), salt, and heavy metals. Examples of gene products that can provide abiotic stress resistance/tolerance in plants include HSFs, LEAs, CORs, CBFs and ABFs (Vinocur and Altman, 2005 Current Opinion in Biotechnology 16:123-132).

[0145] Examples of genes whose products confer resistance to environmental stress include, but are not limited to, mtld and HVA1 (which confer resistance to environmental stress factors); and rd29A and rd19B (Arabidopsis thaliana genes that encode hydrophilic proteins induced in response to dehydration, low temperature, salt stress, and/or exposure to abscisic acid and enable the plant to tolerate the stress (Yamaguchi-Shinozaki et al., Plant Cell, 1994, 6: 251-264)). Other such genes contemplated can be found in U.S. Pat. Nos. 5,296,462 and 5,356,816.

[0146] c. Other Heterologous Gene Products

[0147] Gene regulatory elements provided by the present invention may also be used to drive and/or facilitate other heterologous gene products that confer advantages to the plants that express them.

[0148] For example, nutrient utilization polypeptides can be expressed in transgenic plants. Such polypeptides can maximize utilization of nutrients by plants and may lead to increased yields. Nutrients whose utilization maximization may be desired include, but are not limited to, nitrogen, phosphorous, potassium, iron, zinc etc.

[0149] It may be desirable to trnasgenically express anthranilate synthase, which catalyzes the conversion of chorismate into anthranilate. Anthranilate is the biosynthetic precursor of both tryptophan and numerous secondary metabolites, including inducible plant defense compounds.

[0150] It may be desirable to express mycotoxin reduction polypeptides in plants. Mycotoxins are toxic and carcinogenic chemicals produced by fungi in plants during growth or storage of grains and are major concern for growers. Bt proteins, when expressed in plants reduce mycotoxin content (Wu et al., 2004 Toxin Reviews 23: 397-424).

[0151] Male sterility polypeptides may also be expressed in transgenic plants using gene regulatory elements of the present invention. Male sterility in plants can be induced by expressing several types of polypeptides such as RNase/Barnase (Mariani et al., 1990 Nature 347: 737-741).

[0152] Heterologous gene products that affect grain composition or quality (e.g., by altering key components of grain, such as starch, protein, bran, etc.) may also be expressed. Desired changes in composition may include, for example, relative proportions of starch fractions such amylose and amylopectin; decreased amounts of undesirable components such as phytic acid; and/or improved amino acid content conferred, for example, by modified seed storage proteins that have been. For example, corn zeins modified to contain more lysine can be expressed.

[0153] Polypeptides having therapeutic value can also be expressed in plants using provided gene regulatory elements. Such polypeptides can be harvested from plants transgenically expressing them and then purified for downstream applications. Such polypeptides include, but are not limited to, antibodies, blood products, cytokines, growth factors, hormones, recombinant enzymes, and vaccines that would have a variety of applications in human and animal health. For example, lactoferrin and lysozyme has been produced in rice grains (Ventria Bioscience).

[0154] Heterologous gene products that may be expressed also include RNA molecules, for example, those that regulate a plant gene.

### 3. Transcriptional and Translational Termination

[0155] The transcriptional and translational termination region generally comprises a sequence that encodes a “terminator” (the “terminator sequence”). The transcriptional and translational termination region can be native with the transcription initiation region, can be native with the operably linked polynucleotide sequence of interest, and/or can be derived from another source. Convenient termination regions are available from the T1-plasmid of A. tumefaciens, such as the octopine synthase and nopaline synthase termination regions (An et al., Plant Cell, 1989, 1: 115-122; Guerineau et al., Mol. Gen. Genet. 1991, 262: 141-144; Proudfoot, Cell, 1991, 64: 671-674; Sanfacon et al., Genes Dev. 1991, 5: 141-149; Mogen et al., Plant Cell, 1990, 2:1261-1272; Munroe et al., Gene, 1990, 91:151-158; Ballas et al., Nucleic Acids Res., 1989, 17: 7891-7903; and Joshi et al., Nucleic Acid Res., 1987, 15: 9627-9639).

### 4. Marker Genes

[0156] In some embodiments, nucleic acid constructs include one or more marker genes. Marker genes are genes that impart a distinct phenotype to cells expressing the marker gene and thus allow transformed cells to be distinguished from cells that do not have the marker. Such genes may encode, for example, a selectable and/or screenable marker. In some embodiments, nucleic acid constructs comprise a marker that allows selecting and/or screening in a transformed cell.

[0157] In some embodiments, the transformed cell is grown in culture medium under conditions that select for cells that either have (positive selection) or do not have (negative selection) the marker. In some embodiments, a combination of positive and negative selection is used.

[0158] In some so-called positive selection schemes, most cells in a population are unable to divide and because they lack the ability to use a nutrient (such as, for example, a carbon source) present in the selection medium. In these schemes, the selectable marker confers an ability to use the nutrent. Thus, cells that have the selectable marker gain an advantage over other cells in the population and therefore can be selected.

[0159] In some so-called negative screening/selection schemes, most cells in a population are unable to divide because of the effects of a toxic agent (such as, for example, an antibiotic present in the selection medium). In these schemes, the selectable marker confers an ability to overcome the toxicity (for example, by blocking uptake or by chemically modifying the toxic agent). Thus, cells that have the selectable marker gain an advantage over other cells in the population and therefore can be selected.

[0160] In some embodiments, the transformed cell undergoing selection is a prokaryotic cell, such as E. coli and Agrobacterium. In some embodiments, the transformed cell undergoing selection is a eukaryotic cell, such as a yeast (for example, S. cerevisiae), mammalian, insect, or plant cell.

[0161] In some embodiments, the characteristic phenotype allows the identification of cells, groups of cells, tissues, organs, plant parts or whole plants containing the construct.

[0162] Many examples of suitable marker genes are known in the art and can be used in screening and/or selection schemes. Reagents such as appropriate components of selection media are also known in the art. Examples of such marker genes include, but are not limited to, phosphomannose isomerase, phosphinothricin, neomycin phosphotransferase, hygromyci phosphotransferase, enolpyruvoyl-shikimate-3-phosphate synthetase, etc.

[0163] For example, phosphomannose isomerase (PMI) catalyses the interconversion of mannose 6-phosphate and fructose 6-phosphate in prokaryotic and eukaryotic cells. After uptake, mannose is phosphorylated by endogenous hexokinases to mannose-6-phosphate. Accumulation of mannose-6-phosphate leads to a block in glycolysis by inhibition of phosphoglucose-isomerase, resulting in severe growth inhibition. Phosphomannose-isomerase is encoded by the manA gene from Escherichia coli and catalyzes the conversion of mannose-6-phosphate to fructose-6-phosphate, an intermediate of glycolysis. On media containing mannose, manA expression in transformed plant cells relieves the growth inhibiting effect of mannose-6-phosphate accumulation and permits utilization of mannose as a source of carbon and energy, allowing transformed cells to grow.

[0164] Reporter proteins (such as GUS (β-glucuronidase), green fluorescent protein and derivatives thereof, and luciferase). Reporter genes may allow easy visual detection of transformed cells by visual screening and may also be used as marker genes. Non-limiting examples of eporter proteins include GUS (a β-glucuronidase), green fluorescent protein and derivatives thereof, and luciferase.

[0165] In some embodiments, the marker confers benefit(s) to the transgenic plant such as herbicide resistance, insect resistance, disease resistance, and increased tolerance to environmental stress (e.g., drought). (See, for example, the section on genes of interest above for an expanded discussion of some of these genes.)

[0166] Alternatively or additionally, a marker gene can provide some other visibly reactive response (e.g., may cause a distinctive appearance such as color or growth pattern relative to plants or plant cells not expressing the selectable marker gene in the presence of some substance, either as applied directly to the plant or plant cells or as present in the plant or plant cell growth media). It is now well known in the art that transcriptional activators of anthocyanin biosynthesis, operably linked to a suitable promoter in a construct, have widespread utility as non-phytotoxic markers for plant cell transformation.

B. Tissue-Specific and/or Tissue-Preferred Expression

[0167] In certain embodiments, heterologous gene products) is/are targeted to specific tissues of the transgenic plant such that the heterologous gene products) is/are present in only some plant tissues during the life of the plant. For example, tissue specific expression may be performed to preferentially express polypeptides encoded by heterologous genes in leaves and stems rather than grain or seed (which can reduce concerns about human consumption of genetically modified organism (GMOs)). Tissue-specific expression has other benefits including targeted expression of enzyme polypeptide(s) to the appropriate substrate.

[0168] In certain embodiments, heterologous gene product(s) is/are preferentiallly expressed certain tissues of the transgenic plant such that the heterologous gene products) is/are present at higher levels in some plant tissues than in others during the life of the plant.

[0169] Tissue-specific and/or tissue-preferred expression may be functionally accomplished by using one or more tissue-specific and/or tissue-preferred gene regulatory elements, such as some of the poplar promoters disclosed herein. A number of known tissue-specific promoters may be used in combination with gene regulatory elements disclosed herein. For example, in embodiments wherein two heterologous gene products are expressed in the same plant or other organism, expression of one heterologous gene product may be driven by a gene regulatory element from poplar as disclosed herein, while expression of the other heterologous gene product may be driven by a gene regulatory element that is known, such as a known tissue-specific promoter. Several tissue-specific regulated genes and/or promoters have been reported in plants. Some reported tissue-specific genes include without limitation genes encoding seed storage proteins (such as napin, cruciferin, β-conglycinin, and phaseolin), genes encoding zein or oil body proteins (such as oleosin), genes involved in fatty acid biosynthesis (including acyl carrier protein, stearoyl-ACP desaturase, and fatty acid desaturases (fad 2-1)), and other genes expressed during embryo development (such as Bce4 (Kridl et al., Seed Science Research, 1991, 1: 209)). Examples of tissue-specific promoters that have been described in the art include the lectin (Vodkin, Prog. Clin. Biol. Res., 1983, 138: 87; Lindstrom et al., Der. Genet., 1990, 11: 160), corn alcohol dehydrogenase 1 (Dennis et al., Nucleic Acids Res., 1984, 12: 983), corn light harvesting complex (Bansal et al., Proc. Natl. Acad. Sci. USA, 1992, 89: 3654), corn heat shock protein, pea small subunit RuBP carboxylase, Ti plasmid mannopine synthase, Ti plasmid nopaline synthase, petunia chalcone isomerase (van Tunen et al., EMBO J., 1988, 7:125), bean glycine rich protein 1 (Keller et al., Genes Dev., 1989, 3: 1639), truncated CaMV 35s (Odell et al., Nature, 1985, 313: 810), potato patatin (Wenzler et al., Plant Mol. Biol., 1989, 13: 347), root cell (Yamamoto et al., Nucleic Acids Res., 1990, 18: 7449), maize zein (Reina et al., Nucleic Acids Res., 1990, 18: 6425; Kriz et al., Mol. Gen. Genet., 1987, 207: 90; Wandelt et al., Nucleic Acids Res., 1989, 17 2354), PEPCase, R gene complex-associated promoters (Chandler et al., Plant Cell, 1989, 1: 1175), and chalcone synthase promoters (Franken et al., EMBO J., 1991, 10: 2605). Particularly useful for seed-specific expression is the pea vicilin promoter (Czako et al., Mol. Gen. Genet., 1992, 235: 33).

[0170] Tissue-specific and/or tissue-preferred expression may also be functionally accomplished by introducing a constitutively expressed gene in combination with an antisense gene that is expressed only in those tissues where the gene product is not desired, or where it is desired that the gene be expressed at lower levels. For example, a gene encoding an heterologous or homologous polypeptide may be expressed in all tissues under the control of a constitutive promoter such as constitutive poplar promoters disclosed herein and/or a known constitutive promoter such as the 35S promoter from Cauliflower Mosaic Virus. Expression of an antisense transcript of the gene in a particular tissue, using for example tissue-specific promoter or tissue-preferred promoter, would prevent accumulation of the enzyme polypeptide in that tissue. A tissue-specific and tissue-preferred poplar promoter disclosed herein and/or a known tissue-specific or tissue-preferred promoter may be used to drive expression of the antinsense transcript. For example, an antisense transcript of the gene for which tissue-specific or tissue-preferred expression is desired may be expressed in maize kernel using a zein promoter, thereby preventing accumulation of the gene product in seed. Hence the polypeptide encoded by the heterologous gene would be present in all tissues except the kernel.

### C. Subcellular-Specific Expression

[0171] In certain embodiments, heterologous gene product(s) is/are targeted to specific cellular compartments or organelles, such as, for example, the cytosol, the vacuole, the nucleus, the endoplasmic reticulum, the cell wall, the mitochondria, the apoplast, the peroxisomes, plastids, or combinations thereof. In some embodiments of the invention, the heterologous gene is expressed in one or more subcellular compartments or organelles, for example, the cell wall and/or endoplasmic reticulum, during the life of the plant.

[0172] In some embodiments, directing the product (e.g., a polypeptide and/or RNA molecule) of the heterologous gene to a specific cell compartment or organelle allows the product to be localized such that it will not come into contact with another molecule until desired. For example, if the product is an enzyme polypeptide, it may be possible to prevent the enzyme polypeptide from coming into contact with its substrate during plant growth. Thus, the enzyme polypeptide would not act until it is allowed to contact its substrate, e.g., following physical disruption of cell integrity by milling.

[0173] As another example, targeting expression of a cell wall-modifying and/or lignocellulolytic enzyme polypeptide to the cell wall (as in the apoplast) can help overcome the difficulty of mixing hydrophobic cellulose and hydrophilic enzymes that make it hard to achieve efficient hydrolysis with external enzymes.

[0174] In some embodiments, gene products are targeted to more than one subcellular compartments or organelles. Such targeting may allow one to increase the total amount of heterologous gene product in the plant. In some embodiments, targeting to one or more subcellular compartments or organelles is achieved using a gene regulatory element (such as a promoter) that drives expression specifically or preferentially in one or more subcellular compartments or organelles. Thus, for example, using an apoplast promoter with the E1 endo-1,4-β-glucanase gene and a chloroplast promoter with the E1 gene in a plant would increase total production of E1 compared to a single promoter/E1 construct in the plant.

[0175] Furthermore, in the case of expression of enzyme polypeptides that modify the cell wall (e.g., cell wall-modifying enzyme polypeptides and/or lignocellulolytic enzyme polypeptides)) one can minimize in vivo (pre-processing) deconstruction of the cell wall that occurs when multiple synergistic enzymes are present in a cell by using promoters targeted to different locations in the plant. For example, combining an endoglucanase with an apoplast promoter, a hemicellulase with a vacuole promoter, and an exoglucanase with a chloroplast promoter, sequesters each enzyme in a different part of the cell and achieves the advantages listed above. This method circumvents the limit on polypeptide or other heterologous gene product mass that can be expressed in a single organelle or location of the cell.

[0176] Localization of a nuclear-encoded protein (e.g., enzyme polypeptide) within the cell is known to be determined by the amino acid sequence of the protein. Protein localization can be altered, for example, by modifying the nucleotide sequence that encodes the protein in such a manner as to alter the protein's amino acid sequence. Polynucleotide sequences encoding polypeptides can be altered to redirect cellular localization of the encoded polypeptides by any suitable method (see, e.g., Dai et al., Trans. Res., 2005, 14: 627, the entire contents of which are herein incorporated by reference). In some embodiments of the invention, polypeptide localization is altered by fusing a sequence encoding a signal peptide to the sequence encoding the polypeptide. Signal peptides that may be used in accordance with the invention include without limitation a secretion signal from sea anemone equistatin (which allows localization to apoplasts) and secretion signals comprising the KDEL motif (which allows localization to endoplasmic reticulum).

### D. Expression Vectors

[0177] Generally, any vector that can be used constructed to express a product (e.g., polypeptide or RNA molecule) of a gene after introduction of such a vector in a host cell is considered an “expression vector.” Expression vectors typically contain nucleic acid constructs such as expression cassettes described above inserted into a vector. Expression vectors can be designed for expressing a gene product in any of a variety of host cells, including both prokaryotic (e.g., bacteria such as E. coli and Agrobacterium) and eukaryotic (e.g. insect, yeast (such as S. cerevisiae), and mammalian cells) host cells.

[0178] Nucleic acid constructs according to the present invention may be cloned into any of a variety of vectors, such as binary vectors, viral vectors, phage, phagemids, cosmids, and plasmids. Vectors suitable for transforming plant cells include, but are not limited to, Ti plasmids from Agrobacterium tumefaciens (J. Darnell, H. F. Lodish and D. Baltimore, “Molecular Cell Biology”, 2nd Ed., 1990, Scientific American Books: New York); plasmid containing a β glucuronidase gene and a cauliflower mosaic virus (CaMV) promoter plus a leader sequence from alfalfa mosaic virus (J. C. Sanford et al., Plant Mol. Biol. 1993, 22: 751-765); and plasmids containing a bar gene cloned downstream from a CaMV 35S promoter and a tobacco mosaic virus (TMV) leader. Other plasmids may additionally contain introns, such as that derived from alcohol dehydrogenase (Adh1) and/or other DNA sequences. The size of the vector is not a limiting factor.

[0179] For constructs that are intended be used in Agrobacterium-mediated transformation, the plasmid may contain an origin of replication that allows it to replicate in Agrobacterium and a high copy number origin of replication functional in E. coli. This permits facile production and testing of transgenes in E. coli prior to transfer to Agrobacterium for subsequent introduction in plants. Resistance genes can be carried on the vector, one for selection in bacteria, for example, streptomycin, and another that will function in plants, for example, a gene encoding kanamycin resistance or herbicide resistance. Also present on the vector are restriction endonuclease sites for the addition of one or more transgenes and directional T-DNA border sequences which, when recognized by the transfer functions of Agrobacterium, delimit the DNA region that will be transferred to the plant.

[0180] Methods of preparation of nucleic acid constructs and expression vectors are well known in the art and can be found described in several textbooks such as, for example, J. Sambrook, E. F. Fritsch and T. Maniatis, “Molecular Cloning: A Laboratory Manual”, 1989, Cold Spring Harbor Laboratory: Cold Spring Harbor, and T. J. Silhavy, M. L. Berman, and L. W. Enquist, “Experiments with Gene Fusions”, 1984, Cold Spring Harbor Laboratory Cold Spring Harbor; F. M. Ausubel et al., “Current Protocols in Molecular Biology”, 1989, John Wiley & Sons: New York.

### II. Transgenic Plants

[0181] In one aspect, the present invention provides novel transgenic plants that express one or more polypeptides or RNA molecules under the control of a gene regulatory element provided by the present disclosure. The polypeptides or RNA molecules may be any polypeptide or RNA molecule for which expression in a plant is desired, including, but not limited to, those described herein.

[0182] In certain embodiments, provided are transgenic plants, the genomes of which are augmented with a recombinant polynucleotide comprising a gene regulatory element from poplaras described herein. In some embodiments, the nucleotide sequence of the gene regulatory element has at least 65%, at least 70%, at least 75%, at least 80%, at least 85%, at least 90%, at least 95%, at least 96%, at least 97%, at least 98%, at least 99%, or more identity to at least one of SEQ ID NO: 1 to 158. In some embodiments, the nucleotide sequence of the gene regulatory element is one of SEQ ID NO: 1 to 158. In some embodiments, the nucleotide sequence of the gene regulatory element has at least 65%, at least 70%, at least 75%, at least 80%, at least 85%, at least 90%, at least 95%, at least 96%, at least 97%, at least 98%, at least 99%, or more identity to at least one of SEQ ID NO:90, 94, 103, 117, 131, 137, 145, and 158. (See, e.g., Examples 2, 3, 4, and 5). In some embodiments, the gene regulatory element has at least 65%, at least 70%, at least 75%, at least 80%, at least 85%, at least 90%, at least 95%, at least 96%, at least 97%, at least 98%, at least 99%, or more identity to at least one of SEQ ID NO: 90 and 103.

[0183] In some embodiments, the transgenic plant further comprises a heterologous gene operably linked to the gene regulatory element. In some such embodiments, the gene regulatory element regulates expression of the heterologous gene.

[0184] The heterologous gene may encode any polypeptide or RNA molecule for which expression in a plant is desired, including, but not limited to, those described herein. In some embodiments, the recombinant polynucleotide further comprises a gene terminator sequence that is operably linked to the heterologous gene.

[0185] Nucleic acid constructs, such as those described above, can be used to transform any plant. In some embodiments, plants are green field plants. In some embodiments, plants are grown specifically for “biomass energy” and/or phytoremediation.

[0186] In some embodiments, the plants are monocotyledonous plants. Examples of monocotyledonous plants that may be transformed in accordance with the practice of the present invention include, but are not limited to, bamboo, barley, maize (corn), millet, miscanthus, rice, rye, sorghum, sugarcane, switchgrass, turfgrass, and wheat. Alternatively or additionally, any grass species may be used.

[0187] In some embodiments, the plants are dicotyledonous plants. Examples of dicotyledonous plants that may be transformed in accordance with the practice of the present invention include, but are not limited to, alfalfa, Arabidopsis, aspen, birch, eucalyptus, flax, canola, cotton, cottonwood (e.g., Populus deltoides), hemlock, hemp, larch, oil seed rape, potato, poplar, sisal, spruce, soybean, sunflower, sweetgum, tobacco, tomato, and willow. Alternatively or additionally, any tree species may be used.

[0188] In some embodiments, the plants is a multicotyledonous plant. A non-limiting example of a multicotyledonous plant that may be transformed in accordance with the practice of the present invention is a pine tree (pinus sp.).

[0189] In some embodiments, the plant is a monocotyledonous or dicotyledonous plant of a genus selected from the group consisting of Abelmoschus, Abies, Acer, Agrostis, Allium, Alstroemeria, Ananas, Andrographis, Andropogon, Artemisia, Arundo, Atropa, Berberis, Beta, Bixa, Brassica, Calendula, Camellia, Camptotheca, Cannabis, Capsicum, Carthamus, Catharanthus, Cephalotaxus, Chrysanthemum, Cinchona, Citrullus, Coffea, Colchicum, Coleus, Cucumis, Cucurbita, Cynodon, Datura, Dianthus, Digitalis, Dioscorea, Elaeis, Ephedra, Erianthus, Erythroxylum, Eucalyptus, Festuca, Fragaria, Galanthus, Glycine, Gossypium, Helianthus, Hevea, Hordeum, Hyoscyamus, Jatropha, Lactuca, Linum, Lolium, Lupinus, Lycopersicon, Lycopodium, Manihot, Medicago, Mentha, Miscanthus, Musa, Nicotiana, Oryza, Panicum, Papaver, Parthenium, Pennisetum, Petunia, Phalaris, Phleum, Pinus, Poa, Poinsettia, Populus, Rauwolfia, Ricinus, Rosa, Saccharum, Salix, Sanguinaria, Scopolia, Secale, Solanum, Sorghum, Spartina, Spinacea, Tanacetum, Taxus, Theobroma, Triticosecale, Triticum, Uniola, Veratrum, Vinca, Vitis, and Zea.

[0190] In some embodiments, the plant is a monocotyledonous or dictoyledonous plant of a species selected from the group consisting of Abelmoschus esculentus (okra), Abies spp. (fir), Acer spp. (maple), Agrostis spp. (bentgrass), Allium cepa (onion), Alstroemeria spp., Ananas comosus (pineapple), Andropogon gerardii (big bluestem), Andrographis paniculata, Artemisia annua, Arundo donax (giant reed), Atropa belladonna, bamboo, Berberis spp., Beta vulgaris (sugarbeet), Bixa orellana, Brassica juncea, Brassica napus (canola), Brassica oleracea (broccoli, cauliflower, brussel sprouts), Calendula officinalis, Camellia sinensis (tea), Camptotheca acuminate, Cannabis sativa, Capsicum annum (hot and sweet pepper), Carthamus tinctorius (safflower), Catharanthus roseus, Cephalotaxus spp., Chrysanthemum parthenium, Cinchona officinalis, Citrullus lanatus (watermelon), Coffea arabica (coffee), Colchicum autumnale, Coleus forskohlii, Cucumis melo (melon), Cucumis sativus (cucumber), Cucurbita maxima (squash), Cucurbita moschata (squash), Cynodon dactylon (bermudagrass), Datura stomonium, Dianthus caryophyllus (carnation), Digitalis lanata, Digitalis purpurea, Dioscorea spp., Elaeis guineensis (palm), Ephedra sinica, Ephedra spp., Erianthus spp., Erythroxylum coca, Eucalyptus spp. (eucalyptus), Fragaria ananassa (strawberry), Festuca arundinacea (tall fescue), Galanthus wornorii, Glycine max (soybean), Gossypium hirsutum (cotton), Helianthus annuus (sunflower), Hevea spp. (rubber), Hordeum vulgare (barley), Hyoscyamus spp., Jatropha curcas (Jatropha), Lactuca sativa (lettuce), Linum usitatissimum (flax), Lolium spp. (ryegrass), Lupinus albus (lupin), Lycopersicon esculentum (tomato), Lycopodium serratum (Huperzia serrata), Lycopodium spp., Manihot esculenta (cassaya), Medicago sativa (alfalfa), Mentha spicata (mint), Menthapiperita (mint), Miscanthus giganteus (miscanthus), Miscanthus spp., Musa paradisiaca (banana), Nicotiana tabacum (tobacco), Oryza sativa (rice), Panicum spp., Panicum virgatum (switchgrass), Papaver somniferum (opium poppy), Papaver orientale, Parthenium argentatum (guayule), Pennisetum glaucum (pearl millet), Pennisetum purpureum (elephant grass), Petunia spp. (petunia), Phalaris arundinacea (reed canarygrass), Phleum pratense (timothy), Pinus spp. (pine), Poa pratensis (bluegrass), Poinsettia pulcherrima (poinsettia), Populus balsamifera (poplar), Populus spp., Populus tremuloides (aspen), Rosa spp. (rose), Saccharum sp. (energycane), Salix spp. (willow), Sanguinaria canadensis, Scopolia spp., Secale cereale (rye), Solanum melongena (eggplant), Solanum tuberosum (potato), Sorghum spp., Sorghum bicolor (sorghum, sudangrass), Spartina pectinata (prairie cord-grass), Spinacea oleracea (spinach), Rauwolfia serpentina, Rauwolfia spp., Ricinus communis (castor), Tanacetum parthenium, Taxus baccata, Taxus brevifolia, Theobroma cacao (cocoa), Triticosecale (triticum-wheat X rye), Triticum aestivum (wheat), Uniola paniculata (oats), Veratrum californica, Vinca rosea, Vitis vinifera (grape), and Zea mays (corn).

[0191] In some embodiments, the transgenic plant is fertile. In some embodiments, the transgenic plant is not fertile (i.e., sterile).

[0192] Using transformation methods, genetically modified plants, plant cells, plant tissue, seeds, and the like can be obtained.

[0193] Transformation according to the present invention may be performed by any suitable method. In certain embodiments, transformation comprises steps of introducing a nucleic acid construct, as described above, into a plant cell or protoplast to obtain a stably transformed plant cell or protoplast; and regenerating a whole plant from the stably transformed plant cell or protoplast.

[0194] Cell Transformation

[0195] Delivery or introduction of a nucleic acid construct into eukaryotic cells may be accomplished using any of a variety of methods. The choice of a particular method used for the transformation is not critical to the instant invention. Suitable techniques include, but are not limited to, non-biological methods, such as microinjection, microprojectile bombardment, electroporation, induced uptake, and aerosol beam injection, as well as biological methods such as direct DNA uptake, liposome-mediated transfection, polyethylene glycol-mediated transfection, and Agrobacterium-mediated transformation. Any combinations of the above methods that provide for efficient transformation of plant cells or protoplasts may also be used in the practice of the invention.

[0196] Methods of introduction of nucleic acid constructs into plant cells or protoplasts have been described. See, for example, “Methods for Plant Molecular Biology”, Weissbach and Weissbach (Eds.), 1989, Academic Press, Inc; “Plant Cell, Tissue and Organ Culture: Fundamental Methods”, 1995, Springer-Verlag: Berlin, Germany; and U.S. Pat. Nos. 4,945,050; 5,036,006; 5,100,792; 5,240,855; 5,302,523; 5,322,783; 5,324,646; 5,384,253; 5,464,765; 5,538,877; 5,538,880; 5,550,318; 5,563,055; and 5,591,616).

[0197] In particular, electroporation has frequently been used to transform plant cells (see, for example, U.S. Pat. No. 5,384,253). This method is generally performed using friable tissues (such as a suspension culture of cells or embryogenic callus) or target recipient cells from immature embryos or other organized tissue that have been rendered more susceptible to transformation by electroporation by exposing them to pectin-degrading enzymes or by mechanically wounding them in a controlled manner Intact cells of maize (see, for example, K. D'Halluin et al., Plant cell, 1992, 4: 1495-1505; C. A. Rhodes et al., Methods Mol. Biol. 1995, 55: 121-131; and U.S. Pat. No. 5,384,253), wheat, tomato, soybean, and tobacco have been transformed by electroporation. As reviewed, for example, by G. W. Bates (Methods Mol. Biol. 1999, 111: 359-366), electroporation can also be used to transform protoplasts.

[0198] Another method of transformation is microprojectile bombardment (e.g., through use of a “gene gun”) (see, for example, U.S. Pat. Nos. 5,538,880; 5,550,318; and 5,610,042; and WO 94/09699). In this method, nucleic acids are delivered to living cells by coating or precipitating the nucleic acids onto a particle or microprojectile (for example tungsten, platinum or gold), and propelling the coated microprojectile into the living cell. Microprojectile bombardment techniques are widely applicable, and may be used to transform virtually any monocotyledonous or dicotyledonous plant species (see, for example, U.S. Pat. Nos. 5,036,006; 5,302,523; 5,322,783 and 5,563,055; WO 95/06128; A. Ritala et al., Plant Mol. Biol. 1994, 24: 317-325; L. A. Hengens et al., Plant Mol. Biol. 1993, 23: 643-669; L. A. Hengens et al., Plant Mol. Biol. 1993, 22: 1101-1127; C. M. Buising and R. M. Benbow, Mol. Gen. Genet. 1994, 243: 71-81; C. Singsit et al., Transgenic Res. 1997, 6: 169-176).

[0199] The use of Agrobacterium-mediated transformation of plant cells is well known in the art (see, for example, U.S. Pat. No. 5,563,055). This method has long been used in the transformation of dicotyledonous plants, including Arabidopsis and tobacco, and has recently also become applicable to monocotyledonous plants, such as rice, wheat, barley and maize (see, for example, U.S. Pat. No. 5,591,616). In plant strains where Agrobacterium-mediated transformation is efficient, it is often the method of choice because of the facile and defined nature of the gene transfer. In some embodiments, Agrobacterium-mediated transformation of plant cells is carried out in two phases. First, the steps of cloning and DNA modifications are performed in E. coli, and then the plasmid containing the gene construct of interest is transferred by heat shock treatment into Agrobacterium, and the resulting Agrobacterium strain is used to transform plant cells. In some embodiments, Agrobacterium infiltrates plant leaves. In some embodiments, the bacterial strain Agrobacterium tumefaciens is used to transform plant cells.

[0200] Transformation of plant protoplasts can be achieved using methods based on calcium phosphate precipitation, polyethylene glycol treatment, electroporation, and combinations of these treatments (see, e.g., I. Potrykus et al., Mol. Gen. Genet. 1985, 199: 169-177; M. E. Fromm et al., Nature, 1986, 31: 791-793; J. Callis et al., Genes Dev. 1987, 1: 1183-1200; S. Omirulleh et al., Plant Mol. Biol. 1993, 21: 415-428).

[0201] Alternative methods of plant cell transformation, that have been reviewed, for example, by M. Rakoczy-Trojanowska (Cell Mol. Biol. Lett. 2002, 7: 849-858; the contents of which are herein incorporated by reference in their entirety), can also be used in the practice of the present invention.

[0202] In some embodiments, successful delivery of the nucleic acid construct into the host plant cell or protoplast is preliminarily evaluated visually. Selection of stably transformed plant cells can be performed, for example, by introducing into the cell a nucleic acid construct comprising a marker gene which confers resistance to some normally inhibitory agent, such as an antibiotic or herbicide. Examples of antibiotics that may be used include aminoglycoside antibiotics (such as neomycin, kanamycin, and paromomycin) and the antibiotic hygromycin. Several aminoglycoside phosphotransferases confer resistance to aminoglycoside antibiotics, and include aminoglycoside phosphotransferase I (aph-I) enzyme and aminoglycoside (or neomycin) phosphotransferase II (APH-II or NPTII), which, though unrelated, both have ability to inactivate the antibiotic G418. The hygromycin phosphotransferase (denoted hpt, hph or aphIV) gene was originally derived from Escherichia coli. Hygromycin phosphotransferase (HPT) detoxifies the aminocyclitol antibiotic hygromycin B. As is known in the art, plants have been transformed with the hpt gene, and hygromycin B has proved very effective in the selection of a wide range of plants.

[0203] Examples of herbicides that may be used include phosphinothricin and glyphosate. Potentially transformed cells then are exposed to the selective agent. Cells where the resistance-conferring gene has been integrated and expressed at sufficient levels to permit cell survival will generally be present in the population of surviving cells.

[0204] Alternatively or additionally, host cells comprising a nucleic acid sequence of the invention and expressing a gene product encoding by inventive nucleic acids may be identified and selected by a variety of procedures, including, but not limited to, DNA-DNA or DNA-RNA hybridization and protein bioassay or immunoassay techniques such as membrane, solution, or chip-based technologies for the detection and/or quantification of nucleic acids or proteins.

[0205] Plant cells are available from a wide range of sources including the American Type Culture Collection (Rockland, Md.), or from any of a number of seed companies including, for example, A. Atlee Burpee Seed Co. (Warminster, Pa.), Park Seed Co. (Greenwood, S.C.), Johnny Seed Co. (Albion, Me.), or Northrup King Seeds (Hartsville, S.C.). Descriptions and sources of useful host cells can be found in I. K. Vasil, “Cell Culture and Somatic Cell Genetics of Plants”, Vol. I, II and II; 1984, Laboratory Procedures and Their Applications Academic Press: New York; R. A. Dixon et al., “Plant Cell Culture—A Practical Approach”, 1985, IRL Press: Oxford University; and Green et al., “Plant Tissue and Cell Culture”, 1987, Academic Press: New York.

[0206] Plant cells or protoplasts stably transformed according to the present invention are provided herein.

[0207] Plant Regeneration

[0208] In plants, every cell is capable of regenerating into a mature plant and contributing to the germ line such that subsequent generations of the plant will contain the transgene of interest. Stably transformed cells may be grown into plants according to conventional ways (see, for example, McCormick et al., Plant Cell Reports, 1986, 5: 81-84). Plant regeneration from cultured protoplasts has been described, for example by Evans et al., “Handbook of Plant Cell Cultures”, Vol. 1, 1983, MacMilan Publishing Co: New York; and I. R. Vasil (Ed.), “Cell Culture and Somatic Cell Genetics of Plants”, Vol. I (1984) and Vol. II (1986), Acad. Press: Orlando.

[0209] Means for regeneration vary from species to species of plants, but generally a suspension of transformed protoplasts or a Petri plate containing transformed explants is first provided. Callus tissue is formed and shoots may be induced from callus and subsequently roots. Alternatively, somatic embryo formation can be induced in the callus tissue. These somatic embryos germinate as natural embryos to form plants. The culture media will generally contain various amino acids and plant hormones, such as auxin and cytokinins. Glutamic acid and proline may also be added to the medium. Efficient regeneration generally depends on the medium, on the genotype, and on the history of the culture.

[0210] Regeneration from transformed individual cells to obtain transgenic whole plants has been shown to be possible for a large number of plants. For example, regeneration has been demonstrated for dicots (such as apple; Malus pumila; blackberry, Rubus; Blackberry/raspberry hybrid, Rubus; red raspberry, Rubus; carrot; Daucus carota; cauliflower; Brassica oleracea; celery; Apium graveolens; cucumber; Cucumis sativus; eggplant; Solanum melongena; lettuce; Lactuca sativa; potato; Solanum tuberosum; rape; Brassica napus; soybean (wild); Glycine canescens; strawberry; Fragaria×ananassa; tomato; Lycopersicon esculentum; walnut; Juglans regia; melon; Cucumis melo; grape; Vitis vinifera; and mango; Mangifera indica) as well as for monocots (such as rice; Oryza sativa; rye, Secale cereale; and Maize).

[0211] Primary transgenic plants may then be grown using conventional methods. Various techniques for plant cultivation are well known in the art. Plants can be grown in soil, or alternatively can be grown hydroponically (see, for example, U.S. Pat. Nos. 5,364,451; 5,393,426; and 5,785,735). Primary transgenic plants may be either pollinated with the same transformed strain or with a different strain and the resulting hybrid having the desired phenotypic characteristics identified and selected. Two or more generations may be grown to ensure that the subject phenotypic characteristics is stably maintained and inherited and then seeds are harvested to ensure that the desired phenotype or other property has been achieved.

[0212] As is well known in the art, plants may be grown in different media such as soil, growth solution or water.

[0213] Selection of plants that have been transformed with the construct may be performed by any suitable method, for example, with northern blot, Southern blot, herbicide resistance screening, antibiotic resistance screening or any combinations of these or other methods. The Southern blot and northern blot techniques, which test for the presence (in a tissue such as a plant tissue) of a nucleic acid sequence of interest and of its corresponding RNA, respectively, are standard methods (see, for example, Sambrook & Russell, “Molecular Cloning”, 2001, Cold Spring Harbor Laboratory Press: Cold Spring Harbor).

### III. Uses of Inventive Transgenic Plants

[0214] Transgenic plants and plant parts disclosed herein may be used advantageously in a variety of applications. In many embodiments, transgenic plants of the present invention express polypeptides that confer desirable traits to the plant and/or plant biomass (e.g., resistance to herbicides, resistance to environmental stress, resistance to pests and diseases). In some embodiments, expression of such polypeptides results in downstream process innovations and/or improvements in a variety of applications including ethanol production, phytoremediation and hydrogen production.

### A. Ethanol Production

[0215] In some embodiments, plants transformed according to the present invention provide a means of increasing ethanol yields, reducing pretreatment costs by reducing acid/heat pretreatment requirements for saccharification of biomass; and/or reducing other plant production and processing costs, such as by allowing multi-applications and isolation of commercially valuable by-products. For example, a gene regulatory element provided by the present disclosure may drive expression of one or more lignocellulolytic enzyme polypeptide(s) and/or cell wall modifying enzyme polypeptide(s) in a transgenic plant and such enzyme polypeptides may allow biomass from the transgenic plant to be processed to produce more easily and/or cost effectively.

[0216] Plant Culture

[0217] Farmers can grow different transgenic plants of the present invention (e.g., different variety of transgenic corn, each expressing a transgenic polypeptide or RNA) simultaneously, achieving the desired “blend” of gene products produced by changing the seed ratio.

[0218] Plant Harvest

[0219] Transgenic plants of the present invention can be harvested as known in the art. For example, current techniques may cut corn stover at the same time as the grain is harvested, but leave the stover lying in the field for later collection. However, dirt collected by the stover can interfere with ethanol production from lignocellulosic material. The present invention provides a method in which transgenic plants are cut, collected, stored, and transported so as to minimize soil contact. In addition to minimizing interference from dirt with ethanol production, this method can result in reduction in harvest and transportation costs.

[0220] Tempering

[0221] In some embodiments, provided transgenic plants undergo a tempering phase that conditions the biomass for pretreatment and hydrolysis. Tempering may facilitate reducing severity of pretreatment conditions to achieve a desired glucan conversion yield and/or improving hydrolysis and glucan conversion after treatment. For example, a typical yield from biomass that has been pretreated under standard pretreatment conditions (e.g., 1% sulfuric acid, 170° C., for 10 minutes) is at least 80% glucan conversion. When tempered as described herein, the same typical yield may be achieved under less severe pretreatment conditions and/or with reduced amounts of externally applied enzymes. Less severe pretreatment conditions may comprise, for example, reduced acid concentrations, lower incubation temperatures, and/or shorter pretreatment times.

[0222] In some embodiments, when tempered as described herein and using the same pretreatment conditions, typical yield may be increased above at least 80% glucan conversion.

[0223] Without wishing to be bound by any particular theory, tempering may facilitate such improvements by, for example, allowing activation of endoplant enzyme polypeptides after harvest, increasing susceptibility of lignin and hemicellulose to traditional pretreatment, and/or increasing accessibility of polysaccharides (e.g., cellulose).

[0224] A variety of techniques for tempering may be used. In some embodiments, tempering comprises increasing the temperature of the biomass to activate thermophilic enzymes. Increasing the temperature to activate thermophilic enzymes may be achieved, for example, by one or more of ensilement, grinding, pelleting, and warm water suspension/slurries. In some embodiments, tempering comprises disrupting cell walls. Cell wall disruption may be achieved, for example, by sonication and/or liquid extraction to release enzyme polypeptides from sequestered locations in the plant (which may allow further activation and/or extraction to be added back after pretreatment). In some embodiments, tempering comprises adding accessory enzyme polypeptides during an incubation period before pretreatment. Such accessory enzyme polypeptides may weaken cross linking and improve accessibilty of the biomass to embedded glucanases or xylanases. In some embodiments, tempering comprises incubating the biomass in a particular set of conditions (e.g., a particular temperature, particular pH, and/or particular moisture conditions). Such incubations may in some embodiments increase susceptibility to various glucanases and/or accessory enzyme polypeptides present in the plant tissues or added to the sample. For example, samples may be tempered as a liquid slurry (e.g., comprising about 10% to about 30% total solids) under conditions favorable to activate cell wall-modifying enzymes. In some embodiments, samples are tempered as a liquid slurry for about 1 to about 48 hours. In some embodiments, conditions favorable to activate cell wall-modifying enzymes comprise a pH of about 4 to about 7 and a temperature of about 25° C. to about 100° C. Alternatively or additionally, samples may be tempered as a lower moisture ensilement (e.g., about 40% to about 60% total solids) under anaerobic conditions. In some embodiments, samples are ensiled for about 21 days to several months.

[0225] In some embodiments, tempering is integrated with other processes such as one or more of harvest, storage, and transportation of biomass. For example, biomass can be ensiled under conditions that condition the biomass for subsequent pretreatment and hydrolysis; that is, storage and tempering are combined. In some embodiments, during ensilement of biomass, temperatures are increased in the ensiled material such that thermally active embedded enzymes are activated. Ensilement conditions may allow preservation of biomass while providing sufficient time for enzyme polypeptides to affect characteristics of the biomass (such as, for example, amenability to pretreatment and improvement of subsequent hydrolysis).

[0226] In some embodiments, the tempering phase precedes entirely the pretreatment phase. In some embodiments, the tempering phase overlaps with the pretreatment phase.

[0227] In some embodiments as described herein, transgenic plants express more than one cell wall-modifying enzyme polypeptide. In some such embodiments, it may be desirable to activate enzyme polypeptides sequentially. It may be desirable to do so, for example, if the efficiency of endoplant enzymes is a function of the sequence in which they are activated. For example, beta-glucosidases may be most efficient after endo- and exoglucanases have cleaved cellulose into dimers, and cellulases and hemicellulases may be more efficient when accessory enzymes have reduced cross-linkages between cellulose, hemicellulose, and lignin. Accordingly, in some embodiments, cellulases might be activated after ferulic acid esterases (FAEs) have had the opportunity to cleave ferulate-polysaccharide-lignin complexes, or after other accessory enzymes have had the opportunity to cleave cellulose-hemicellulose cross linkages.

[0228] Sequential activation could be attained, for example, by using enzymes with different peak temperature and/or pH optima. Increasing temperature continually or stepwise (e.g., during a tempering step), could thereby allow activation of enzyme polypeptides with lower temperature optima first. For example, a wound-induced promoter could be used to produce a non-thermostable enzyme polypeptide after harvesting that breaks lingin cross-links and leads to cell death, before increasing temperature during tempering to activate a thermostable cellulase in the biomass.

[0229] In some embodiments as described herein, cell wall-modifying enzyme polypeptides are specifically targeted to organelles and/or plant parts. In some embodiments, cell wall-modifying enzyme polypeptides are specifically targeted to seeds. Cell wall hydrolyzing enzymes in the grain could improve yields of fermentable sugars by targeting the cellulose and hemicelluolose in the grain bran and fiber, or could loosen or weaken the outer layers of the grain kernel, making it easier to mill. Starch in corn grain is often processed to produce ethanol, but significant quantities of cellulose and hemicellulose from the bran and fiber are not used. In some embodiments, incorporating a tempering step prior to starch hydrolysis (e.g., of transgenic corn grain), endogenous enzymes can act on the fiber and bran and increase the yield of fermentable sugars. In some embodiments, dry seed (e.g., dry wheat) is tempered by soaking in water at a slightly elevated temperature for several hours before further processing. Such a tempering step may decrease the energy required for milling and increase the quality and eventual yield. Endogenous enzymes in the grain may also provide additional benefits.

[0230] In some embodiments, tempering comprises externally applying an amount of at least one cell wall-modifying enzyme polypeptide. External application of cell wall-modifying enzyme polypeptides is discussed in more detail in the “Saccharification” section.

[0231] In some embodiments, the seed or grain of a transgenic plant is tempered.

[0232] Pretreatment

[0233] Conventional methods for processing plant biomass include physical, chemical, and/or biological pretreatments. For example, physical pretreatment techniques can include one or more of various types of milling, crushing, irradiation, steaming/steam explosion, and hydrothermolysis. Chemical pretreatment techniques can include acid, alkaline, organic solvent, ammonia, sulfur dioxide, carbon dioxide, and pH-controlled hydrothermolysis. Biological pretreatment techniques can involve applying lignin-solubilizing microorganisms (T.-A. Hsu, “Handbook on Bioethanol: Production and Utilization”, C. E. Wyman (Ed.), 1996, Taylor & Francis: Washington, D.C., 179-212; P. Ghosh and A. Singh, A., Adv. Appl. Microbiol., 1993, 39: 295-333; J. D. McMillan, in “Enzymatic Conversion of Biomass for Fuels Production”, M. Himmel et al., (Eds.), 1994, Chapter 15, ACS Symposium Series 566, American Chemical Society: B. Hahn-Hagerdal, Enz. Microb. Tech., 1996, 18: 312-331; and L. Vallander and K. E. L. Eriksson, Adv. Biochem. Eng./Biotechnol., 1990, 42: 63-95). The purpose of the pretreatment step is to break down the lignin and carbohydrate structure to make the cellulose fraction accessible to cellulolytic enzymes.

[0234] Simultaneous use of transgenic plants that express one or more enzyme polypeptides (e.g., lignocellulolytic enzyme polypeptides and/or cell wall-modifying enzyme polypeptides) according to the present invention may reduce or eliminate expensive grinding of the biomass and/or reduce or eliminate the need for heat and strong acid required to strip lignin and hemicellulose away from cellulose before hydrolyzing the cellulose.

[0235] In some embodiments, lignocellulosic biomass of plant parts obtained from inventive transgenic plants is more easily hydrolyzable than that of non-transgenic plants. Thus, the extent and/or severity of pretreatment required to achieve a particular level of hydrolysis is reduced. Therefore, the present invention in some embodiments provides improvements over existing pretreatment methods. Such improvements may include one or more of: reduction of biomass grinding, elimination of biomass grinding, reduction of the pretreatment temperature, elimination of heat in the pretreatment, reduction of the strength of acid in the pretreatment step, elimination of acid in the pretreatment step, and any combination thereof.

[0236] In some embodiments, lower temperatures of pretreatment may be used to achieve a desired level of hydrolysis. In some embodiments, pretreating is performed at temperatures below about 175° C., below about 145° C., or below about 115° C. For example, under some conditions, the yield of hydrolysis products from lignocellulosic biomass from transgenic plant parts pretreated at about 140° C. is comparable to the yield of hydrolysis products from non-transgenic plant parts pretreated at about 170° C. Under some conditions, the yield of hydrolysis products from lignocellulosic biomass from transgenic plant parts pretreated at about 170° C. is above about 60%, above about 70%, above about 80%, or above about 90% of theoretical yields. Under some conditions, the yield of hydrolysis products from lignocellulosic biomass from transgenic plant parts pretreated at about 140° C. is above about 60%, above about 70%, or above about 80% of theoretical yields. Under some conditions, the yield of hydrolysis products from lignocellulosic biomass from transgenic plant parts pretreated at about 110° C. is above about 40%, above about 50%, or above about 60% of theoretical yields. Such yields from transgenic plant parts can represent an increase of up to about 20% of yields from non-transgenic plant parts.

[0237] In some embodiments, such improvements are observed in inventive transgenic plants expressing an enzyme polypeptide (e.g., a cell wall-modifying enzyme polypeptide and/or lignocellulolytic enzyme polypeptide) at a level less than about 0.5%, less than about 0.4%, less than about 0.3%, less than about 0.2%, or less than about 0.1% of total soluble protein. Without wishing to be bound by any particular theory, the inventors propose that low levels of enzyme expression may facilitate modifying the cell wall, possibly by nicking cellulose or hemicellulose strands. Such modification of the cell wall may make the biomass more susceptible to pretreatment. Thus, biomass from inventive transgenic plants expressing low levels of cell wall-modifying enzymes may require less pretreatment, and/or pretreatment in less severe conditions.

[0238] In certain embodiments, the pretreated material is used for saccharification without further manipulation. In other embodiments, it is desired to process the plant tissue so as to produce an extract comprising the cell wall-modifying enzyme polypeptide(s). In this case, the extraction is carried out in the presence of components known in the art to favor extraction of active enzymes from plant tissue and/or to enhance the degradation of cell-wall polysaccharides in the lignocellulosic biomass. Such components include, but are not limited to, salts, chelators, detergents, antioxidants, polyvinylpyrrolidone (PVP), and polyvinylpolypyrrolidone (PVPP). The remaining plant tissue may then be submitted to a pretreatment process.

[0239] Saccharification

[0240] In saccharification (or enzymatic hydrolysis), lignocellulose is converted into fermentable sugars (i.e., glucose monomers) by enzyme polypeptides present in the pretreated material. If desired, externally applied cellulolytic enzyme polypeptides (i.e., enzymes not produced by the transgenic plants being processed) may be added to this mixture. Extracts comprising transgenically expressed enzyme polypeptides obtained as described above can be added back to the lignocellulosic biomass before saccharification. Here again, externally applied cellulolytic enzyme polypeptides may be added to the saccharification reaction mixture.

[0241] In some embodiments, the amount of externally applied enzyme polypeptide that is required to achieve a particular level of hydrolysis of lignocellulosic biomass from inventive transgenic plants is reduced as compared to the amount required to achieve a similar level of hydrolysis of lignocellulosic biomass from non-transgenic plants. For example, in some embodiments, processing transgenic lignocellulosic biomass in the presence of as low as 15 mg externally applied cellulase per gram of biomass (15 mg/g) yields a similar level of hydrolysis as processing non-transgenic lignocellulosic biomass in the presence of 100 mg/g cellulase. This represents a reduction of almost 90% of cellulases needed for hydrolysis can be achieved when processing biomass from inventive transgenic plants. Such a reduction in externally applied cellulases used can represent significant cost savings.

[0242] In some embodiments, a mixture of enzyme polypeptides each having different enzyme activities (e.g., exoglucanase, endoglucanase, hemi-cellulase, beta-glucosidase, and combinations thereof), and/or an enzyme polypeptide having more than one enzyme activity (e.g., exoglucanase, endoglucanase, hemi-cellulase, beta-glucosidase, and combinations thereof) is added during a “treatment” step to promote saccharification. Without wishing to be bound by any particular theory, such combinations of enzyme activity, whether through the activity of an enzyme complex or other mixture of enzymes, may allow a greater degree of hydrolysis than can be achieved with a single enzyme activity alone. Commercially available enzyme complexes that can be employed in the practice of the invention include, but are not limited to, Accellerase™ 1000 (Genencor), which contains multiple enzyme activities, mainly exoglucanase, endoglucanase, hemi-cellulase, and beta-glucosidase.

[0243] Saccharification is generally performed in stirred-tank reactors or fermentors under controlled pH, temperature, and mixing conditions. A saccharification step may last up to 200 hours. Saccharification may be carried out at temperatures from about 30° C. to about 65° C., in particular around 50° C., and at a pH in the range of between about 4 and about 5, in particular, around pH 4.5. Saccharification can be performed on the whole pretreated material.

[0244] The present Applicants had previously shown that adding cellulases to plants transgenically expressing E1, an endoglucanse (EC 3.2.1.4) increases total glucose production compared to adding cellulases to non-transgenic plants, which suggests that simply using transgenic E1 plants with current external cellulase techniques can substantially increase yields of products (e.g., such as ethanol, methanol, butanol, and/or other alcohols). The experiment also indicates that adding cellulases to E1 plants increases total glucose production compared to adding cellulases to non-transgenic plants. This is an important result since it suggests that simply using transgenic E1 plants with current external cellulase techniques can substantially increase yields of products (e.g., of ethanol, methanol, butanol, and/or other alcohols) in the presence or absence of pretreatment processes.

[0245] Fermentation

[0246] In the fermentation step, sugars, released from the lignocellulose as a result of the pretreatment and enzymatic hydrolysis steps, are fermented to one or more organic substances (e.g., ethanol, methanol, butanol, or other alcohols) by a fermenting microorganism, such as yeasts and/or bacteria. The fermentation can also be carried out simultaneously with the enzymatic hydrolysis in the same vessels, again under controlled pH, temperature and mixing conditions. When saccharification and fermentation are performed simultaneously in the same vessel, the process is generally termed simultaneous saccharification and fermentation or SSF.

[0247] Fermenting microorganisms and methods for their use inproduction (e.g., of ethanol, methanol, butanol, and/or other alcohols) are known in the art (Sheehan, “The Road to Bioethanol: A Strategic Perspective of the US Department of Energy's National Ethanol Program” In: “Glycosyl Hydrolases For Biomass Conversion”, ACS Symposium Series 769, 2001, American Chemical Society: Washington, D.C.). Existing ethanol production methods that utilize corn grain as the biomass typically involve the use of yeast, particularly strains of Saccharomyces cerevisiae. Such strains can be utilized in the methods of the invention. While such strains may be preferred for the production of alcohols (e.g., ethanol, methanol, and butanol) from glucose that is derived from the degradation of cellulose and/or starch, the methods of the present invention do not depend on the use of a particular microorganism, or of a strain thereof, or of any particular combination of said microorganisms and said strains.

[0248] Yeast or other microorganisms are typically added to the hydrolysate and the fermentation is allowed to proceed for 24-96 hours, such as 35-60 hours. The temperature of fermentation is typically between 26-40° C., such as 32° C., and at a pH between 3 and 6, such as about pH 4-5.

[0249] A fermentation stimulator may be used to further improve the fermentation process, in particular, the performance of the fermenting microorganism, such as, rate enhancement and yield (e.g., of ethanol, methanol, butanol, and/or other alcohols). Fermentation stimulators for growth include vitamins and minerals. Examples of vitamins include multivitamin, biotin, pantothenate, nicotinic acid, meso-inositol, thiamine, pyridoxine, para-aminobenzoic acid, folic acid, riboflavin, and vitamins A, B, C, D, and E (Alfenore et al., “Improving ethanol production and viability of Saccharomyces cerevisiae by a vitamin feeding strategy during fed-batch process”, 2002, Springer-Verlag). Examples of minerals include minerals and mineral salts that can supply nutrients comprising phosphate, potassium, manganese, sulfur, calcium, iron, zinc, magnesium and copper.

[0250] Recovery

[0251] Following fermentation (or SSF), the mash is distilled to extract the alcohol (e.g., ethanol, methanol, butanol, and/or other alcohols). Alcohol with a purity greater than 96 vol. % can be obtained.

[0252] By-Products

[0253] The hydrolysis process of lignocellulosic raw material also releases by-products such as weak acids, furans, and phenolic compounds, which are inhibitory to the fermentation process. Removing such by-products may enhance fermentation.

[0254] In some embodiments, processing of provided transgenic plants comprise removing, from the hydrolysate, products of the enzymatic process that cannot be fermented. Such products comprise, but are not limited to, lignin, lignin breakdown products, phenols, and furans. In certain embodiments, products of the enzymatic process that cannot be fermented are separated and used subsequently. For example, products can be burned to provide heat required in some steps of the alcohol (e.g., ethanol, methanol, butanol) production such as saccharification, fermentation, and alcohol (e.g., ethanol, methanol, butanol) distillation, thereby reducing costs by reducing the need for current external energy sources such as natural gas. Alternatively or additionally, such by-products may have commercial value. For example, phenols can find applications as chemical intermediates for a wide variety of applications, ranging from plastics to pharmaceuticals and agricultural chemicals. Phenol condensed to with aldehydes (e.g., methanol) make resinous compounds, which are the basis of plastics which are used in electrical equipment and as bonding agents in manufacturing wood products such as plywood and medium density fiberboard (MDF).

[0255] Separation of by-products from the hydrolysate can be done using a variety of chemical and physical techniques that rely on the different chemical and physical properties of the by-products (e.g., lignin and phenols). Such techniques include, but are not limited to, chromatography (e.g., ion exchange, affinity, hydrophobic, chromatofocusing, and size exclusion), electrophoretic procedures (e.g., preparative isoelectric focusing), differential solubility (e.g., ammonium sulfate precipitation), SDS-PAGE, distillation, or extraction.

[0256] Some of the hydrolysis by-products, such as phenols, or fermentation/processing products, such as methanol, can be used as ethanol denaturants. Currently about 5% gasoline is added immediately to distilled ethanol as a denaturant under the Bureau of Alcohol, Tobacco and Firearms regulations, to prevent unauthorized non-fuel use. This requires shipping gasoline to the ethanol production plant, then shipping the gas back with the ethanol to the refinery. The gas also impedes the use of ethanol-optimized engines that make use of ethanol's higher compression ratio and higher octane to improve performance. Using transgenic plant derived phenols and/or methanol as denaturants in lieu of gasoline can reduce costs and increase automotive engine design alternatives.

[0257] Reducing Lignin Content

[0258] Another way of reducing lignin and lignin breakdown products that are not fermentable in hydrolysate is to reduce lignin content in a transgenic plant of the present invention. Such methods have been developed and can be used to modify the inventive plants (see, for example, U.S. Pat. Nos. 6,441,272 and 6,969,784, U.S. Pat. Appln. No. 2003-0172395, US and PCT publication No. WO 00/71670).

[0259] Combined Starch Hydrolysis and Cellulolytic Material Hydrolysis

[0260] Transgenic plants and plant parts disclosed herein can be used in methods involving combined hydrolysis of starch and of cellulosic material for increased yields (e.g, of ethanol, methanol, butanol, and/or other alcohols). In addition to providing enhanced yields, these methods can be performed in existing starch-based alcohol processing facilities.

[0261] Starch is a glucose polymer that is easily hydrolyzed to individual glucose molecules for fermentation. Starch hydrolysis may be performed in the presence of an amylolytic microorganism or enzymes such as amylase enzymes. In certain embodiments of the invention, starch hydrolysis is performed in the presence of at least one amylase enzyme. Examples of suitable amylase enzymes include α-amylase (which randomly cleaves the α(1-4)glycosidic linkages of amylose to yield dextrin, maltose or glucose molecules) and glucoamylase (which cleaves the α(1-4) and α(1-6)glycosidic linkages of amylose and amylopectin to yield glucose).

[0262] Hydrolysis of starch and hydrolysis of cellulosic material from provided transgenic plants can be performed simultaneously (i.e., at the same time) under identical conditions (e.g., under conditions commonly used for starch hydrolysis). Alternatively, the hydrolytic reactions can be performed sequentially (e.g., hydrolysis of lignocellulose can be performed prior to hydrolysis of starch). When starch and cellulosic material are hydrolyzed simultaneously, the conditions are preferably selected to promote starch degradation and to activate cell wall-modifying enzyme polypeptide(s) for the degradation of lignocellulose. Factors that can be varied to optimize such conditions include physical processing of the plants or plant parts, and reaction conditions such as pH, temperature, viscosity, processing times, and addition of amylase enzymes for starch hydrolysis.

[0263] Provided transgenic plants (or plant parts) may be used alone or in a mixture with non-transgenic plants (or plant parts). Suitable plants include any plants that can be employed in starch-based alcohol production (e.g., corn, wheat, potato, cassaya, etc.). For example, the present inventive methods may be used to increase ethanol yields from corn grains.

### EXAMPLES

[0264] The following examples describe some of the preferred modes of making and practicing the present invention. However, it should be understood that these examples are for illustrative purposes only and are not meant to limit the scope of the invention.

### Example 1

### Identification and Isolation of Poplar Promoters

[0265] In the present example, gene regulatory elements were identified and isolated from the poplar genome. Promoters of poplar genes were identified by searching for gene sequences similar to that of genes having or suspected of having desirable expression patterns in other plants. Nucleic acids containing identified promoters were isolated by polymerase chain reaction (PCR)-based amplification. These gene regulatory elements may be useful, for example, in driving expression of genes in transgenic plants.

### Identification of Poplar Gene Regulatory Elements

[0266] Two methods were used to identify gene regulatory elements of interest from the poplar genome. In one method, protein sequences of interest were identified in the poplar proteome (see the website whose address is “http://” followed immediately by “genome.jgi-psf.org/Poptr1_{—}1/Poptr1_{—}1.home.html”) using the BLASTp tool by searching for sequences similar to protein sequences of Arabidopsis or maize gene products having functions and/or expression patterns of interest. Protein sequences of gene products from Arabidopsis or maize that are known to be involved in cell structure and function, intermediary metabolism, or tissue-specific and developmental stage-specific functions were used as input in the BLASTp searches. Genomic DNA sequences that encode the putative homologous proteins were then identified.

[0267] In a second method, publicly available EST databases were analyzed for the abundance of particular transcripts in various tissues and corresponding full length genes were identified in the poplar genome.

[0268] Both approaches resulted in identification of poplar genomic DNA sequences of interest, and novel regulatory DNA sequences within and/or in the proximity of such genomic DNA sequences were discovered for several classes of genes. The 3 kb region upstream of the genes were identified using a poplar genome database and designated as regulatory DNA sequences.

[0269] These novel regulatory DNA sequences are listed as SEQ ID NO: 1 through SEQ ID NO: 158 of the accompanying Sequence Listing.

### Isolation and Cloning of Poplar Gene Regulatory Elements

[0270] Using genomic information obtained as described above, oligonucleotides (see Table 2) were designed for use as PCR primers to amplify various poplar gene regulatory elements. Poplar promoter sequences were amplified with high-fidelity Phusion Taq Polymerase (New England Biolabs, MA) or PLANTAMP™ PCR system (Epicentre Biotechnologies WI) using genomic DNA isolated from young leaves of two month old hybrid poplar plants (Poplulus tremula×P. alba, clone 717) as template. Gradient PCR was performed using a dual block thermal cycler (Biorad, CA) for optimum amplification of promoter sequences. PCR-amplified fragments were gel-purified and cloned into intermediate pCR Blunt vectors using the Zero Blunt PCR cloning kit (Invitrogen, CA).

[0271] A variety of promoters were isolated and cloned in this manner, including the promoters for the L5L2 gene, (SEQ ID NO: 117) which encodes an L5-like ribosomal protein; an ubiquitin protein that is constitutively expressed in eukaryotic genes (Ubi2) (SEQ ID NO: 90); early response to dehydration 4 (ERD4) (SEQ ID NO: 137), a gene within a family that signals water deficiency and results in metabolic pathways to mitigate osmotic stress; methionine adenosyltransferase 2 (SAM2) (SEQ ID NO: 131), which synthesizes S-adenosylmethionine (SAM) from methionine and ATP; calmodulin protein (CalL2) (SEQ ID NO:103), which induces responses to change in Ca²⁺ concentrations in cells; and elongation factor protein (Elf1a) (SEQ ID NO: 94), which plays a role in translational elongation. A 2 kb PtPAL2 (SEQ ID NO: 158) promoter belonging to the class of phenyl alanine ammonia lyase gene family, which is involved in the biosynthesis of phenylpropanoids, was also isolated and cloned.

TABLE 2
Sequence-specific oligonucleotide primers for
amplifying various poplar promoters

| SEQ | Regulatory/ | | Sequence |
|---|---|---|---|
| ID | Gene | Primer | (listed in 5′ to |
| NO. | sequence | Name | 3′ direction) |
| 159 | GUS-NOS | ES190 | CGCGGATCCATGGTAGATCTGAGGGTAAA |
| | | | TTTC |
| 160 | GUS-NOS | ES191 | CGCGGATCCATGGTAGATCTGAGGGTAAA |
| | | | TTTC |
| 161 | PtUbi2 | ES778 | GAGGTCGACTACCTTCCCACCACAAGTAC |
| | | | TTCACCAGCA |
| 162 | PtUbi2 | ES779 | GAGGGATCCCGTTCTGTTTCTTCTTGTTG |
| | | | TTTCT |
| 163 | PtL5L2 | ES788 | GAGACTAGTCTCATCGCTTTGGAGAATC |
| | | | TTCCAGCAG |
| 164 | PtL5L2 | ES789 | GAGGTTAACTATGAAAGAGAGAAATTAGG |
| | | | GATTAGCCTTCTA |
| 165 | PtElf1a | ES843 | GCGGTCGACGGTGGTATAGGTAATTAAT |
| | | | AGATAAACAAGATG |
| 166 | PtElf1a | ES844 | GCGATCGATGATGAACTTTGGGAGAGAA |
| | | | ACTGGAATTGAT |
| 167 | PtERD4 | ES934 | GAGAGGCGCGCCCGAAATCTATCCAA |
| | | | CAAGGAC |
| 168 | PtERD4 | ES935 | GAGATTAATTAACATCATCATCATCAG |
| | | | GTAACGT |
| 169 | PtSAM2 | ES947 | CCATAAGCTTATTCTGACATCCAACG |
| | | | GCTATG |
| 170 | PtSAM2 | ES948 | CCATGTTAACTTTCTCAAGCTGCAG |
| | | | ATCACA |
| 171 | PtCal2 | ES950 | GAGAGGCGCGCCTATTCAGGTCAATT |
| | | | CATCTGACTG |
| 172 | PtCal2 | ES952 | GAGACCGCGGTTCTCTTTTGAAAAATG |
| | | | AAACCTAGAAGGAGAT |
| 173 | PtPAL2 | ES1055 | TTGGCGCGCCAGATTCTTCATAGAG |
| | | | GGAGCAAGA |
| 174 | PtPAL2 | ES1056 | CTAGTCTAGATTCTTATTTATATATAT |
| | | | GTTAGACCAAAGAAAAGCTT |
| 175 | PtDREP4 | ES1039 | GCTCTAGATCTATAATTAATGGAA |
| | | | TGTAATCCCTTA |
| 176 | PtDREP4 | ES1040 | CGCGGATCCATCTCTCTTGTCTC |
| | | | AAGTACTCAACAAAT |

### Example 2

### Expression in Particle-Bombarded Leaves Directed by Poplar Regulatory Sequences

[0272] Construction of base expression vectors to generate reporter gene fusions pUC18 (Invitrogen, CA), a high-copy number cloning vector pUC18, was used for creating base expression vectors. First, a region comprising the coding sequences of the β-glucuronidase (GUS) gene with (GUSintron) or without (GUS) the catalase intron and the NOS terminator (NOS) was PCR-amplified from a plasmid. The catalase intron within the GUS gene is spliced out during the process of transcription in plant cells and eliminates background expression in bacteria. Restriction enzyme recognition sites BamHI-KpnI were engineered into PCR primers ES190 and ES191 (see Table 2). PCR amplified GUSintron-NOS and GUS-NOS fragments were digested with BamHI-KpnI enzymes and cloned into pUC18 vector to create the pUC18-GUSintron-NOS and pUC18-GUS-NOS vectors. Next, a multi cloning site (MCS) cassette comprising HindIII-AscI-PstI-SalI-PacI-NotI-XhoI-SpeI-HpaI-XbaI-BamHI restriction enzyme recognition sites was PCR amplified, digested with HindIII-BamHI enzymes, and cloned into pUC18-GUSintron-NOS and pUC18-GUS-NOS to create pUC18-MCS-GUSintron-NOS (FIG. 1A) and pUC18-MCS-GUS-NOS (FIG. 1B) constructs, respectively.

Cloning of Poplar Promoters into Expression Vectors

[0273] In general, poplar promoters isolated as described in Example 1 were classified into two categories depending upon the presence or absence of the first intron located within the promoter region. Poplar promoters (PtP) without the first intron were digested from the vectors into which they had been cloned in Example 1 with appropriate restriction enzyme(s) and then cloned into the pUC18-MCS-GUSintron-NOS vector. Poplar promoters with the first intron were cloned into the pUC18-MCS-GUS-NOS vector to create pUC18-PtP-GUSintron-NOS (FIG. 2A) and pUC18-PtP-GUS-NOS (FIG. 2B) vectors.

Particle Bombardment of P. tremula×P. alba Leaves

[0274] Preparation of Tungsten Particles

[0275] M10 Tungsten particles (Sylvania, Mass.) were used for microprojectile bombardment experiments. Stock solution was prepared by washing 50 mg of tungsten particles in 500 μl 95% ethanol followed by washing them in water 4-6 times. Finally the particles were suspended in 500 μl ddH₂O, Stock solution was used for a maximum of 12 hours after preparation. Twenty-five μl of the resuspended tungsten particles were mixed with 5 μl of DNA (200 to 500 ng/μl) in a microcentrifuge tube and vortexed for a few seconds. The mixture was allowed to sit at room temperature (RT) for 1 minute. DNA was precipitated by adding 25 μl of 2.5 M CaCl₂ and 10 μl of 100 mM Spermidine and leaving the mixture on ice for 4 minutes; precipitated DNA adhered to the tungsten particles. Fifty microliters of the supernatant was discarded and the remaining coated particles were kept on ice. Two microliters of the tungsten particle preparation was used per shot within 15 minutes. The mixture was discarded after 15 minutes and freshly coated particles were prepared as needed for subsequent rounds of particle bombardment.

[0276] Particle Bombardment

[0277] Young and fully developed leaves from 2 to 3 month old poplar plants were used in the experiments. The leaves were placed in a petri dish with wet filter paper and bombarded with coated particles at 60 psi pressure and 28 psi in HG vacuum. After particle bombardment, leaf tissue samples were kept in Petri plates under moist conditions for a 24 hr period.

### Analysis of Histochemical GUS Expression in Plant Tissue

[0278] In order to monitor the GUS expression pattern for each transformed plasmid, bombarded poplar leaves were incubated with 5-bromo-4-chloro-3-indolyl glucuronide (X-Gluc) in a standard procedure for 24-48 hr as previously described (Jefferson et al. 1987, “GUS fusions: beta-glucuronidase as a sensitive and versatile gene fusion marker in higher plants,” EMBO J. 6:3901-3907, the entire contents of which is herein incorporated by reference). Tissue samples were cleared using 70% ethanol repeatedly until most of the chlorophyll was removed. Samples were observed for GUS expression (seen as blue spots) and images were taken using a Leica stereo microscope (Leica, N.J.). Results are presented in FIG. 3.

[0279] Based on the strength of GUS expression as evaluated histochemically, poplar promoters were classified into high expressers (PtUbi2 and PtCal L2 (SEQ ID NOs: 90 and 103 respectively); medium expressers (PtL5L2 (SEQ ID NO: 117)) and weak expressers (PtElf1a (SEQ ID NO:94)). A well-known dicot promoter, CMPS (Cestrum yellow leaf curling virus promoter; U.S. Pat. No. 7,166,770) was included as a control. These results suggest that poplar promoters PtUbi2 and PtCal L2 can drive high levels of heterologous gene expression in dicots.

### Example 3

### Poplar Promoter-Directed Tissue-Preferred Expression

[0280] In the present Example, poplar gene regulatory elements of the present invention demonstrated an ability to drive expression in tissue-preferred manner. Experiments described in this Example also demonstrate that inventive gene regulatory elements can drive expression in tissues other than leaves.

[0281] Stem sections were used for particle bombardments. Both transverse and longitudinal sections were used from 3 month old plants. Particle bombardment and GUS activity experiments were performed as described in Example 2.

[0282] Results are presented in FIG. 4. In this transient expression system using GUS as a reporter gene, PtUbi2 (SEQ ID NO: 90) drove strong expression in both stems and leaves, while PtCal2 (SEQ ID NO: 103) drove strong expression in leaves and drove weak expression in stems. PtL5L2 (SEQ ID NO: 117) drove medium expression in both leaves and stems.

[0283] These results demonstrate that the suite of inventive regulatory elements provided by the present invention include regulatory elements that can direct diverse tissue-preferred expression patterns.

### Example 4

### Stable Expression of Transgenes in Poplar Directed by Inventive Regulatory Elements

[0284] In the present Example, inventive regulatory elements are used to drive expression of structural genes that encode proteins or polypeptides. Genes of interest (GOI) may include, but are not limited to, genes that encode cell wall modifying enzymes and genes that confer agronomically important traits, as described in the claims.

Stable Poplar Transformation with Poplar Promoters Driving Genes of Interest (GOIs)

[0285] A plant transformation binary vector pED-MCS-GOI-NOS was created to allow cloning of different poplar regulatory elements (including promoters) to drive genes of interest (FIG. 5A). This vector uses kanamycin selection as the selectable marker for identifying and isolating transgenic plant cells. Plant transformation vectors containing genes encoding endoglucanase, β-glucan glucohydrolase, and GUS under the control of poplar promoters were constructed (FIG. 5B). Control vectors with 35S promoter and CMPS promoter were used to compare expression levels of poplar promoters. Poplar transformation was performed as previously described (Leple et al. (1992) “Transgenic poplars: expression of chimeric genes using four different constructs,” Plant Cell Rep. 11:137-141, the entire contents of which are herein incorporated by reference).

### β-Glucan Glucohydrolase Enzyme Assay

[0286] Total plant protein extract was made from fresh leaf tissue as described below. Leaf tissue was frozen in liquid nitrogen and homogenized in a bead beater (MINI BEADBEATER™, Biospec products) with 3 to 4 zirconium beads (2.0 mm size, Biospec products). Leaf protein was extracted by suspending the homogenized tissue in protein extraction buffer (50 mM MES, pH 5.6, 2 mM DTT, 1 mM EDTA, 1× protease inhibitor cocktail (Sigma P9599), 0.1% (w/v) Triton X-100). Samples were centrifuged and supernatants were used to determine total protein concentration using a Bradford protein assay. Two microliters of the total protein sample was incubated for 10 minutes with 200 μL of Bradford reagent (Quick Start Bradford 1× Dye Reagent, Bio-Rad, CA). The dye in the reagent turns blue when bound to the protein, which is measured at the 590 nm absorbance. Protein concentrations were determined by comparing absorbance readings to a standard curve of known bovine serum albumin (BSA) concentrations.

[0287] Glucan glucohydrolase (GGH) enzyme activity was determined using methyl-umbelliferyl-cellobioside (MUC) as a substrate. Fifteen microliters of protein extract was incubated for 1 hr at 85° C. in 200 μL of buffer (0.05 M sodium acetate, pH 5.0 and 0.1 M calcium chloride) containing 10 mM MUC fluorescent substrate. GGH enzyme activity cleaves the MUC substrate and produces fluorescent MU product, which is then read in a plate reader (Tecan GENios, MTX lab systems Inc, VA) at 355 nm excitation and 450 nm emission wavelengths. GGH enzyme activity was measured as strength of fluorescent signal normalized to mass in grams of protein used for analysis. The promoter strengths of the CMPS and PtL5L2 promoters were compared by measuring the level of GGH activity in protein extracts prepared from 5 different transgenic events. Based on the level of GGH expression, we concluded that the PtL5L2 promoter had similar or greater activity than the CMPS promoter (FIG. 6). In one event where the strength of the PtL5L2 promoter was compared with that of the 35S promoter, the PtL5L2 promoter was significantly stronger than the 35S promoter (FIG. 6).

### GUS Expression in Stable Transgenic Poplar Plants

[0288] Trangenic poplar plants were transformed with constructs containing poplar promoters driving GUS gene expression. These promoters included PtDREP4, PtERD4, PtSAM2, PtCal2, PtL5L2 and PtUbi2. Transgenic poplar leaf tissues were harvested for GUS protein expression from one month old plants, while roots were sampled from transgenic seedlings grown in magenta boxes. Tissues were incubated with 5-bromo-4-chloro-3-indolyl glucuronide (X-Gluc) in a standard procedure for 24-48 hr as previously described (Jefferson et al. 1987). Tissue samples were cleared using 70% ethanol repeatedly until most of the chlorophyll was removed. Samples were observed for GUS activity (as indicated by blue color), and images were taken using a Leica stereo microscope (Leica, N.J.). Results are presented in FIG. 7. FIGS. 7A-F illustrate GUS expression in fully expanded leaves, and FIGS. 7G-I illustrate GUS expression in roots. The various promoters tested have differential expression patterns in leaf tissues. For example, PtERD4 drives strong expression, while PtCal2 drives weak expression, in the leaves of sampled plants. All transgenic tissue examined clearly showed significant activity compared to wild type poplar leaves (compare to FIG. 7J). Expression in roots appears strong in the three promoters tested.

### Example 5

### Poplar Promoters Drive Expression in Other Dicotyledonous Plants

[0289] The present Example demonstrates that regulatory elements of the present invention can also be used to drive gene expression in other dicot plants.

### Expression Constructs

[0290] Promoters PtUbi2 (SEQ ID NO: 90), PtL5L2 (SEQ ID NO: 117), PtPAL2 (SEQ ID NO: 158) and 35S were cloned into expression vectors to drive expression of an E1 gene encoding an endoglucanase. PtERD4 (SEQ ID NO:137), PtSAM2 (SEQ ID NOL 131) and PtUbi2 (SEQ ID NO: 90) were cloned into binary vectors to drive GUS gene expression (FIG. 5B).

In Vitro Enzyme Activity in Nicotiana benthamiana Infiltrations

[0291] Nine-week old Nicotiana benthamiana plants were infiltrated with suspensions of Agrobacteria containing the construct of interest. Each suspension was adjusted to an optical density (OD₆₀₀) of 0.1 to ensure that equivalent concentrations of bacteria were injected into each leaf sample. Young leaves were injected with 0.75-1 mL of bacteria suspended in infiltration media. The infiltration media was buffered to pH 5.5 and contains a source of sugar and phosphate for the bacteria as well as acetylsyringone, which aids the bacteria in infection of plant cells. Following infiltration, plants were grown for three days at 74° F. in a room with a 14:10 photoperiod, supplemented with 50 μmol m⁻¹ s⁻² florescent and incandescent light.

[0292] The infiltrated region of each leaf was cut out and ground in buffer. Total leaf proteins were extracted through an ammonium sulfate precipitation before washing and resuspension in buffer. Total protein concentration was obtained with a bicinchoninic acid (BCA) protein assay and compared to a standard curve of known bovine serum albumin (BSA) concentrations by a colormetric reaction (Fisher, Rockford, Ill.).

[0293] Enzyme Assays

[0294] Total protein extracts were used to measure enzyme activity on methyl-umbelliferyl-cellobioside (MUC) and carboxymethyl cellulose (CMC) substrates. For MUC assays, proteins were incubated with the florescent substrate in buffer for 30 minutes. Endoglucanases cleave the fluorescent substrate; thus, the plate reader will read a stronger fluorescent signal from samples with higher endoglucanase activity. As shown in FIG. 8, all poplar promoters tested in this Example have detectable expression levels in tobacco leaves. The PtL5L2 promoter directs significantly higher levels of enzyme expression (as judged by enzyme activity) than does the 35S promoter, while the PtUbi2 directs slightly higher levels of enzyme expression as compared to the 35S promoter. PtPAL2 drove lower levels of expression of E1 in tobacco leaves, but still much greater levels than the negative control (leaves not expressing E1).

[0295] The polysaccharide CMC is also hydrolysable by endoglucanases. Plant protein extracts were prepared from leaves infiltrated with either PtUbi2:E1 or 35S:E1, then were incubated with the CMC for 1 day at 65° C. before being measured by a colorimetric dinitrosalicylic acid (DNS) assay to quantify glucose concentration. If a promoter drives high expression of E1, then a high glucose concentration is expected in the corresponding protein extract. After 24-hr incubation of endoclucanase-containing constructs on CMC substrates, glucose equivalents were ˜0.217 mg for the PtUbi2 promoter and ˜0.211 mg for the 35S promoter, consistent with the MUC data in FIG. 8.

### In Vitro GUS Assays

[0296] Similarly to constructs used in in vitro enzyme assays, constructs with promoters of interest driving GUS were infiltrated into N. benthamiana and stained for GUS activity as described in Example 4. The PtERDL4 (pABC262) and PtSAML2 (pABC263) promoters drove low constitutive expression throughout the infiltrated leaf area (FIG. 9A). In contrast, the PtUbi2 (pABC267) promoter drove strong GUS expression in patchy regions of the infiltrated area, concentrating most at the infiltration front and directly around the injection sites (FIG. 9B). Control plants infiltrated with infiltration media (C-IM) had no GUS expression in either experiment. None of the infiltrated samples exhibited GUS expression along the tissue surrounding the veins, suggesting leaf-specific expression in infiltrated experiments.

TABLE 3
Sequences of novel gene regulatory elements

Sequence ID: 1
Sequence Length: 2450
Sequence Type: DNA
Organism: Poplar sp.
AATTGTGTTTTCTGTTAGGTTTCCACTAACAAGTTTGTTCTTAGCCTAGGAGGATCTTGGTGAACCCATG
AAAACCAGGGGGGCCCTGTTTAAGAATGTACTCTTGTGGTGAATTATGAAGATGATGGGAAAACCAACGA
AGAGCTTTTTATCCCGTCGAAAATGTTAGAACCCGGTTATTACCCGGCCGGGTTGATTACATTGAGTAAA
ATCTAGTTCATCTAAAAATAGTGACCGAGTAATGTCAATTATATTGAGTAATTAAAGATATTTATTGACT
TATATCTTGTATGATAATTTTCAGGTGGTTCCAATAAATTGTATTACAATTCAAGGATGATTACATGTTC
TAAATCATTTTTAGCAGGAATTCTAAAGCATTCATTAGTGAGATTAAAAGGTAATTAGTGACCATCTAAC
TTGAAACCTTGCTCGAGCCGAGCCAAGACGAGTTAATAAAAAAACTTGATTTTTTTAAAGAATAATATCT
TTTTAATTTTTTAAAAAATTAAATTAATAAACCATGCTTTTAAGTTTTAACAGAGTCCACCATTATTGTA
GCTAAAAAAGAGGAGGGATATATTATTGCCCTCTTAAAAAAGGAAAGAAGGAAGAGGAAAGAAAGGAAAG
CAGCCAGCATTTTTATCCTCTCCTGTTCTAATTAAAGAAAATACAACCACAATTAGCGGCTGATTAATTA
AAAAGTGGTCAACCATAAATCTGTCCCACGTTGTGTTTGTTATGCATGGCACATCATATGCCTCATTTAG
CAAGATACAATGTCAGCCGTTTGATCCTTGATTCATCCATCTAGTCAACGACGGCTCGGTTGCTAGGAAG
CGAAAATCAAGGGTGTTATTGACAGGTAGTGGTGGGCATTACAACACCTGAAAAGACACACCGACATGAT
CTCCAGACAGTTGGAAAAGCAATGCTGAGTTGGCAATTAAAGTTCCTTTTTATTTTTTTTATTTTTTCCC
TTTTATTTTCCTATGAAATAATAACGAAAAAGAGGTCTGCTTGATTATAAAATTTTGCTTTTTTTAGCGG
GGTCCTTTTTCAAGGACTAATGTACCCCTCGACGCTGAAATGCCACAACCATGCCTTCATTTTTGTCAAT
TTTATAATTGAGAAGGGTAATTATGGAATTCCAAGTACACTAATCACGATTTCCTGTTTAACAGGGTTTC
TAATCTAAACTTACCACCACTAGCAAGGTAACTGTCCTGTGAAAAAAAGCAAGGCAAACACGGTCAAAGA
CAATGCAATGAATTTAGGATGGGAATGCCCTAATTTTTTTTTAGCTAAATTTCATTTTTTTACCTTTTTA
TTCCCACTTGTTTAGAAAAATACTTCAGAATATCTCTAAAATAGAATAAAAAATAAACAAAATATTAGGG
TTTAGTTACATTGATAAGTTTTGTAATTGAAAGTATTAGTATTTTAATTTTTTAAAATGAAAAAAATTAT
ACCTTAGCATATGAAACTAAGATAAAAATTGATATTTTTTAATATTATTTAAAACACAAAAGCTAAATAA
ATATTTTAATCATATATGGATGAATCTTTAATATTATAATACATTATTTTTTAGATTAGCGGATCAAAAC
GATTCAAAATATTAAAAAAATTAATTTTTAATAAAAATTTTTTGAATTTTTATAAAATATAATTTATACC
GCGTTGTGATAAGCAATGAAATGGTCAAATTGAGATTTGAGAGATTGGTCAATAACCTTAACAAAAATCC
CACAATTCAAGGGCTTGCCTGACCAACATGCCCTTGGCCAAGGACGAGAGGTCAAATGAGGCATTCTAAC
AAATATCAAGGGCATATCCGTCCACACAAATAAAACAACCGAAAGCGAGCCAGCTGTGTACACAATGAGC
ATGACGCGTCATGGGGTCCGTAGATCAGATGCTCGAAACCAACGGCCAAGATCATCCCAAAGCAAATTTG
AAGTTCATTTAAGTTGAATTTCATCCGAGGCTGAAATTTCATTTCACATCTTCCCCTTTTTTAAAACAAG
AGGGCGGGTACCTTGAACAAACGCTCACACACAGCGAAGGAAGAAAGAAACACAAAGAACAATTCAGTTT
TCTGAACGGTATGCTGTTTGAATTTCAAAATTCTTCATCTTTCTGATCCGGGTTTAGCTCAGATTATAAC
ATCATTGTGTCAAACCATTAAAAAATTTGATCTTTAAATGTGGGTTAATTTTATTTTGTGATTTAGCATT
GCTAAAGTTTTGATCTTTGATGTGATTTTACAAAATGAACATTCAGATTTTGATTATGATTTGTAAAAAG
GAAATGGGATCTTTTTATTTTACTTTCCATTGGGATCATCATGCTCTTTTTGTCAAAATCGTGCATTAAA
TTGTCGTGATTCCCTATTTGTATAGCATTTTAATGTAAGGTGGCATTTTGAACGTGGCAGGTGAGAGGAA
Sequence ID: 2
Sequence Length: 3003
Sequence Type: DNA
Organism: Poplar sp.
TTCGGTGCTTGTCTAGTAGAAAGTGGAGTTCACGTTCCCATTCAATTGCCTGAGGATCGTAGGCTTTTAT
TCTAGACAGCTTAAATTAATGGAAACTTAGCAACGAGGATAGTTCGTCGTCAAACCTTTATTTCTTTTCT
TGTCTTGAATTATTTGGAATAGTTTTTTGAATCGTATTGGTTTAGCTAATTTGTTGAAATGGTGGCTTCG
TTACGATGTTTGGTACTTTTTTATTTCTTTTATTTCCATTCGCTTGCTGTTGATGCCAATTAAGGCCATG
TAGCAGTTGTTTACTGAGTGGTGGGTGAAATTCATTATCCATGTCACATCAGAACTTATTCTGAAGCAAC
ACAGGCTACTAGCTAACCTACTTGCAGACTGAAAAAAAGGATTTGGATCATAACACAACCCCCTCTTAGT
AAAATAAAACTCACATTTATGATCCATAAAAGAAGTCTGCTCACAACAGGCAACGTGTTAATAGCCTAAT
TCATCTAGCAGATGTCTCATGCTGCTGCATCCATCCATGAGAAAACCCACAAATTGCAGCGCCAAAACTA
CATCCACGTGCAAGCTCGTTCAATCCCTTGACATTGTATTTGGTGTTTATCTAAAGCTTAGAGGCTGGTG
GAATCGATCATTGATGCTTTGCATACGTGGAACATTGGTGACCAAATCATCATTGCCAATGGTTGCATTC
TGCTGCTTATACGGTAACCACTTTACGGGGAGGGAAAAAAAACAGGCGTTTACACCACAGAAAATCGAAG
GTTTCAGACTTTTTGCTCCAAAACGAGCCCACCCTTGTGATTCCAATGCTAGCATTGTCCAAGTAAAAGA
GAAAGGGTCCGGGCCATGGAAGCGCGCTCCAACCGTTATGTGCTGGAAAACGTAGCTCCACCTAGTTTAG
AATGGTCATTTTAGCACAAAAGGCAGACGCTAGACTGCATCATTTATCCAACAAAATCTTTGATTCTTCC
ACACCTGGCCATTTCATAATCAAAGGAATGTTCCTACCCTTTTTACTCATGAAGGGAAGAGTTGTCGCAG
CGATGCACAGGTGCAGCTCACTCAAATACTCAGATAGTGGGCTGTAGCCTGTACTAATGGTATTTAAAAA
TAAAATAGAAACTTGAAGAAGAGTAGCTCGATTAGCACTAATCCATCATCTCCTTCAAAACCATTTTTTT
CATATTATTAAACACATCTTCTTAAGACTAACGTAAATACTTACATGCATGCATGTGTATATATATATAT
ACACACAGTGGTTGATACTTGATACCAAGTTTATGTTCTAGAACAGTTGTGTGCTCTAAATAGTATGGTA
GATTTTTTAATTAATTTTTGTAATAAAATTATACTTATCCACGAAAATTGAGCTACTCTCGTTGTTAAAT
TCTAGTTTTTTCATTGAAGAGGTAAAAAAGAGATATCCTGACAGCATATTTATCACCGTAAGAAATTTAA
TAACTTATACAAAAAAAGGAAAAAAACAATAATAGTAATTTTTATGATTTGTTTAGAGTATGGTAGAGGT
TATTTTTAAAGTGTTATTTATTTAAAAATATATTAAAATTATTTTTTTATTTTTTAAAAATTATTTTTTA
TATTTATACATTAAAACAATAAAAAAAACATAAAAAAATTAGTTTAAAACTAAAAAAAATCAAAACATTT
CAAAAATACACCATGCCAAGCAAGAACACTACGTACAGGTAAGATTTGTAAGAAGGGAAAAAAGAGGAGG
GGTAAAATAGAGAAGACAGGAAGGAGAAGAAAAAGGAAATGACTGGAAAACCGGAAGGAGCTGGCTGGAT
CCAGCAAGAAATAATAACCCCAGATAGATAGGAAATATGAAAAAAGAAGAGCGCATGACGCGTTCCTCTC
TGTAAGTTGTGCCCACAAAATAAAAATAAAAGAATCCAACGGCCCACAACTCATCTCGCGTTCCATATAT
TGAGCTTCTTCCTTTCTCTTTCCAAAAGCTCAAAAAAAAAAAAAAAACATTTTAGTTTTGTTTGTGTGCG
TCGTCGCCTCGCTCACTCTCTCAAAATCCCTCCTATAACAAGGTCGGTCCTTTTCTTTTTCAATCAATCG
CTCTTCTATCTTTTCGATCTGCTGTATAGCGGTCTGGATCTGATCTCCTTTTGATTCTGCATTTTGCTTT
TTAGTATTTTGTAATGTGCGATTCATGCTCGCAAATCATTTTTTTTATCTGCATTTTGGATTCTTCTTAA
TCCCATATTTGGATCTGGTTTTATTATTATTCCCGGGTTCGTTTTGTTTAAAATCTGAAGGAAAATTGGG
AAATTAACAGTGAAGACCGTAAATTTTACTGTAATTACAAAGTTGGAAATGGATTCTAAATGCTCACTTT
TCTTTATGTCTGTGTCTTTAGATTTCGTTTGCAATTGCTTTAAAAATGTGATTTAACATTATTCTGAAAT
GATATCCGAGATTTACTTGCCTATTCTCTTAAGTCTTTTTTATGCATTTTGATTTTGATGCGATATATTT
GTTCACTTTATTTTTCCTAATCGATTTCTTTTCCGTTTTTAAGACACGGAAACACGACGGTTGGTTTGCC
ATTGCATTTTCTTTTTTTGGGGGCCAATGTACACGACGGTTGGTTTGCCATTGCATTTTCTTTTTTTGGG
GGCCAATGTACACGACGGTTGGTTTGCCATTACATTTTCTTTTTTTGGGGGCCAATGTTCAGTAGTTAGA
TTTCCAGATTAAGGTGTTTGTGTAATAAGACATGGGATCTATAGATGTGATACATTGATTTGCAATGTTG
CTGTTTGTTTTTTAACTGATGAAGGCGAAAAAACTCATTTGCTTGTTTGTGTTCTTTTTTTTTTCAATAT
TTTATTTTTTACTCTGTTTTGCATTAATGCATGGCTAGTTAGGAGATGATTTTGATGTTTTTGCTTCGCT
TGATAAAAGAAATTTATTCCTTTTTTGTTGATTATCACTGTTTGGTATTACAGGCAGTAGAAG
Sequence ID: 3
Sequence Length: 2000
Sequence Type: DNA
Organism: Poplar sp.
TACGTTGACCACTGGTTTTTGGTTTCTAGATCTATAACCAAATCATCATTGCTACTGGTGACATTCTAAT
GCCTATACAGTATGCACCTTGCTGGGAGGGAATATAAGGTGTTTACACTCAAGAGATTCAGAATTTCCAG
CTCTTTTGTCCCAAAACGCACCCACCCTTGTGATTCATATGCTTCGACTGGCAGCATTGTCCATGTAAAA
GAGAAAGAGTCCGTCCGAGCCATTGAAGCGCACTCCAACTATTATGTGCTGGAAAAGGTAGCTCCAGCTA
GCTTGGAATGACCATTTTAGCAAAAAGTAAACGCTGGACTATATTATTTATCCAACACAAATCTTTGATT
CTTCCATGAATCATGGCTTGCCATTTCATAATCAAGGGAAATTTCCAACCTTTTTACTCGTGAAGGGAAA
AGTAGTAGTAGAAATGCACATGTCCAACTCTAACATGCTCAAATAATGGGGACTGTACTGACAGGATTTA
AAAAAACTTAAAAAAGGGTAAATGGATGAGCACTAATCAATCATCTCCTTTGTAATATTGAAAGAGAGAT
CTTTGCAGCACGATATCAGTACTAAACAATTCGATTATAGTTGACGTGGCTCAGACCCCGACAAAATTTA
GGTCAATTTGCCTGTCACTATCGATCTTACAATAAAATCCCCATATAGAAATAAAATTAAGGTAGTGTAC
TCCCGGTAAGAAATAAAAAAAGAAAAAGAAAAAGAAAAAAGAGGAGGCTAAAATAAAGAAAACAGACGGA
GGAGCAACAAAAAGAAAATGACTGGAAAACCGGAAGGAGCTGGATCGAGCAAGAAATAATAACTCCAGAC
AGACAGGAATAGGGAAGATTTAAAAAAAAAGAAAAAAGAGCGCATGACGCGTTCCCCTCTGTAAGTTGTG
CCCACAAAATAAAAATAAAAGAATCCAGCGGCTCACAACGCATGTCGCTTTGCATATATTTTGAGCTTCT
TCCCTTCTCATTCAAAAAGAGAAGAAGGCTAGGCAACCCACCTCGAAAACATTTTATTTTGTTTGTGTGC
TGGGCGTCGTCTAGCTTTCTCTAACTCTCTCAAAATCCTTCCTCTCCTTTAACAAGGTCCATTTCTTCCT
CCTCTTTTCGATCAATCGCTGTTCTCTCTTCTCGATCTATTATTTAGCAGCCTCGATCTGTGCTGTTTTT
TATTTTGCATTTTGCTTCATAAAGCTGGGGATCTTGTAATGTGCTGCGGCTCATGCTGAGAAATCATTTC
TTTTTGTTCCTTTAATTTTGATCGTCTGTTTGGATCTGATTTTGTGATCATTTTACTTTTTTTGTCTAAA
ATCTGAAAGAAAATTGGGAAATTAGCGACGAAGAACGTAAAACACATTAGAATCATAATGTTGGAAATGG
AGTTGTTGCGTTCGCGTTTTTTAGTGGATGTCTATGTTTTAATTTAGCATGCAATTGGTATGTTGCGTTA
AAGAAGAACGTAATTTCGCGAGATTTGCCTGTTCTCTTTAATCATTTATTTGCAGGTATTCACAAATGCT
TCGATGCATTTTGATTTGGATGCGATTTATCTGTCCATTTTCTGATTATTTTTTAATTCCAAATATTTTG
TTTTTACTAGTTTTTAAAAAGACAGAAACACGATGGTTGATTTGCTATTTCATCCTCGTTAATATTAAGT
ATTTAGTTTTGTGCAATGAGCTACGAATCTATAATGAATGTGGTGTGATTGATTTGTTTTGTGTTGCTTT
ACTTAATTTCAAAAAATATATATATATTATCCTCTGCTTCCTTTGTTGTGTTGCTTTACTTTACTTTATG
CTAGTTGCAAAATCTGGTTTGATTCTGTCTAATAATTTGAATAAACAGTGTCATGTACTTATTACGAGAT
GATTTTGATGATGTTCAAGAAGAGAAAATGAATTGATGAATCTGCTTTGGTTGATAAAAGAAGTCCGTAC
CTTTTTGTTGATTGCTGTTTGGTGTTGCAGGCATTAGAAG
Sequence ID: 4
Sequence Length: 3073
Sequence Type: DNA
Organism: Poplar sp.
AAATTGATTAGAGAAAATTATATCCCTTCTCATTTCAAAAGCACGGTGCACGGTGAAAAGACTAAAAATC
TTTAAAAGTAAACATTTCAATAGTAGCATTAAGTGATAATTTGGTATTTTCAAAATAGTTTTTTTCATTA
TTATATGTAAAATGAGAGACAATTTTGTGTTTGGATATATATAAAAAATCAAAAGTACAATGAAAACGAC
CAAAATGCCATTGGAAATTAAAATTGGCCTCAAGGGATTTTTTCAATTTTTTTCCAAAAGTTTTTTCAAT
ATTAACATGTTAGATCAGGGGTAAGTTGATATTTAACTAAATAAAAAACAAAAAGGGATAAGAGCATTTG
ATGCATTTAGAGGCACGCAGGTGACGCCCGCTACCTTTGAGCAACGCATGTGGCGCCTCCCGATGTTCAA
AAATACCCTTTCTGTTGTTGTAAGTGCTTATGTGTTCTTTTTTTATTGGTACAACATGTGTCTCAAATGG
TGGCCCAAGTTGTAACCGGTAGGCCTTTTTTCCTCTCTTCTTTTCTCTCTCCTCCCCCAAAAATTAGAAC
TTGGCTCTAGTGTTTGTTGGTATTTCAATTCTATTTCTTACTCTTTTAATTGTTAATTTTTTGTCTTGAT
TCTTTTGTAGAAGTCTTATTTGTTTTTAATTTCATCATTCAATTCAAATTGAAAATATTATATTTTTCAA
TTTAATCCTCATTATTTTGATTTCTAATTTTCTTGTTGGTTATTTTGTAAAAGTTATCATTTTTTTTTTA
ATTTCACCATCCAATCAAAATATTGTTTGTATTTTTTATGTCAATTTTGATCTTTATTCTTTTGAATTTT
CTTGGTCATTTTACTAAATTAGTTTTTCTTTTCAATTTTGATTCTCATTCTTTTTATCACTATTTTTTGA
ATCCCTTTGTATAATTAATTTTTTTTTTCAATTTCATCATTCAATACTTGATTGATTAAGAATTGAACTT
TATGATTTTTCTAAATTGAGTGTTTCAAGTCTAATAACTCGGATTACGGATTTGAAAAACTAACATGATT
TTTTTTCAAAAAAGAGCTTTATAATCCTTTTTATTTTTTATAGGGTTATTTCAATCTCATGATTTGTGCC
GCGAGTTTAGTGAGATATCCTGGTTTGGCTCGACCTTGATTACAATAGTTATATATTTGCTACACTAACT
CGGGTTGATTAAGAATAATTTATTTATGTCTTTTTTATCTATTTTTAGCACATAAACATTAATTTTTATA
AAAAAAAAATAGCGGGTACCGAAGCTGGTATCTCAGCTAAACAGTAAACCATATTCATGATAGAGAATTC
CCGTTCAAATCACAACCGACCCGACGCCACTTGACCCTACCACTTCAAAACAAACCAACCATCCCCAACC
GCCAAAGCCGTCCAAGTCAAGATCCGACGGCTGAAATTAAACAAAAAGAACAAACCGAGTCAGCAAAGCC
GAAAGAGTCCCAAGTCCAGAACATGAAACGGAGGTCATAAGAAAATAACAGAATCAGTTACAAATTAGTA
TCTCTATTCTTACAAAACAAATCAACTAATCCCTCTAATTTTTAATTAATTAATCTTTTGTCAATCATGC
TTAATTTAATTTTAAGTTATTCCAAAAGAATTCTTCTCATCAATATTTATATAATACTTATTTATTTATC
CAAATTTTATGTTTATTATAACAAAATAAATAAATAGATTAGAAAACAAATATAAAATGAATGAAAAGAA
CTAATTAACCCGTTTTTAAAATTATAAGGTCTATTTTATCTACTTTGAACAATTACAGGGACTAGTTTTT
ATAACACTGAAAATAAGAGAGACAGAGGGAAAGGCTGTCAGACAGGTCACCCTATCTTTTCTCGTGGTGG
AAATGATTCCTCTCTCTAAAAAATTTGGTCTTAATTTCATTTGCATTTCAAAAATTCCTTCTCTCTTTCT
CTCTCACTATATATATAAACCTCCTCTCTTCTCTTCAGCTAACCCTTACACTCCTCCATTTTCGTCTCAC
CCTCTCTCTCGAGCGCAACCACCAGCTAGCAAGTCAGGCAGGCCACATCTTTCGCTAGACTTGGCTTGGT
CTGTTTCGCTCTCTGTCTCTAGATATCTCCTCTGTCTCCGACTTCAAAAGGTAAGTGACTGATCTGTATT
TGTGTCGATTTGTTTTGAATTGTGTAGATCGGGTGAACGGCTCGTTTTCTGATTTGAAATTGGTTGAATC
GTGGATTTTTTCTTCGCTTTATCGGTTTTGTGTTACCGATCTAAGTTAAATTTTGGTGTATTGTGTTGTT
GAAGGTTAGATCTAGAGGTTTTTGGTGGTTTTGTTTGGATCGTTTGATTTGATGGCTTGATCTGGTTTTG
TTGTGTATAGATCTGCTGAGATGTTTTTAGATCTGTTGATTTGACCTTTCAGATTTTGATTTTGATTGCT
ATCTCGTATGAACTTGAAGAAACGTAGAATTTAAATCGTGTGCAAATTGGACATTTTATGTGGTGATTGA
TTGAGATTTAGCTTCAGCTGTGGTGTCTTGGATTCATTTTCAATGACATTTGTGTTGTTTTTAAGCTTTA
AACTCTTATTTTTTTTCATAAGATGGCTGGATTCTGTGAGTAAATGGTAAACATGCTGATTGGAATTTGA
ATCGTGTGAAATTGGAAATGATGTGTGGTGATTGCCTGAGATTCAGTTTAAGCTGCAGTGTCTTGAATTT
ATTTTTTTAATGATATTTGGGTTGTTTTCTAAGCTTAAAATTCTTATTTTTTCATAAGATAGCTGAATTC
CGAGAAGAGTAAAATTGTAGTGAATGCTGATTGGAATTTGATGAGTAAATTTTATTGTTTGCATTTGTTT
GAAGCTTTGGATGGTAAATGATTTGGAATGATTAATTGGCTGGTAGATTTCATTTTGTGAACAGGGGAGA
AATTGGATATGTTGTAGTTGATTATTCTTTATACAGATGGCTCTGTAAATTATCTAGAAAGATTTTTCTG
TATTTATGGTTGCTTCTTTTGCTCTTTTTTATTTTTTATTTTTTTGTACAGAATTTGTAGAAA
Sequence ID: 5
Sequence Length: 3818
Sequence Type: DNA
Organism: Poplar sp.
ACATTTTTTCCCTCTGATTTTGATTTTTCACTGTCTGCAATAATGACATCAGAGAAAATATTAAATGCCA
AAAAGAAATAAAAGATTCTCGAGTTTTTGACAAAAAAAAACCTGTAAGCCAAGCCTACCCAAGCCGACCC
CAGGCTTGCCATTTTTCAGACTCGACTCCTCGTGTCCCTGCTTAATAATAAATGTTAGGGCAAAAATTAC
ACACACACAATATTAAGATGATGTAGTTTTTTTTTTTTTAGTTTAACGTGGGTGTCCGGGCCAGCTTACG
TGCACCTCGACTAATCCCACGGGCCCTGAAGTTAACGACCATGTAAGCCTTCAGTGGCCATCATATGAGC
AACCACAGGGCTCGAACCTGAAACCACGGAGGGAGCAAACCTCTTGATCCCAAGTTCTTACCACTGGACC
ACCACCTAGATGGTTAGATGATGTAGTTTTTAATCATCTAGTAGGTGGTCCAATGGTAAGAGTTTGAGAT
TAAGAGATTTGCTCTCTCTGTAGTTTTAAGTTCGAGCTCTGTGGTTGCTAATATGATGACCACTAGAGAC
TTATTTGGTCGTTAACTTCAGGACCCGTAGGATTAGTTGAGGGGTGCACAAACTGACCCGGACATCCACA
TTAATAAAAAAGAAAAAAGAAAAAGTTGATTTAGTTTTACATTCAAATTATTTTATTTTTTCAAGATAAA
TTAACAGAGACCATTAATAATCTTACAATTAAGATTGATATAAGAAATTGTTTAATGGTGAAGTTTATAT
TACCTATATAACTGGAATATAATTTTGAGTTTTTCTCTGAATGCAATTACTCTGCTCCTCCATTTCAAAG
TTTCTATAATTATCATATTTTTTCTCAAGAAGGAAAGTTTCTAGTCTAATCAAGTGAAAGAATAATTCAC
CAAATAACTGAATAAGAACATGTATATTTTATAATAAGATCAAGAATATGAAATATGATTTTCTCCTATA
ATATAAATTAAATAAATTTATAGGGTTTTTTATATTCTAAAATATAAGTTTAATGAAAATATAATTGACA
GAAAAATAGACATGAAGCTTCTTCTTTTTTTCGAGTTTCTCTCTTATATTCTCTTAAAAATAATTGCTTT
AAAGAGATTATAAGTAATTTCTTACAGCATTTAAAGTGAATATTATTTTTTTATCATATAAATATTAGAA
TTTTTGACAAAATACTATCATTTTATGTTTTAACTAGGGGTGAGCAAAAAAACTAAAAAATCGATTAAAC
CGAGAAAACCGGAAAAAAAATAACAAAAAAAACCGAACAGTGAAAAAAACCCGATTAAACTGATTAAAAT
TTTGAAAAAACCAACTTGTTCGGTTCGGTTTTATAAGCATGAAATCAAAAAAACCGAACCAAACCCAAAC
CGGAAAAAAACTAAGCCAAACTGAAAAATCGAGCCAAATCAAAAACCGAAGCCAAACCGGTCTGAATTCC
TAGTTTTAACATTTTATGTTATGATATATTAGATCAGTTATATATTTTAATATGAAAATTCAGAATTTTG
TAAAAAAATACCATCAACTTTATTTGAGTTGAAATTGACTCGATTTTTTTTTTCTAAGCTTGAAGTGGCT
ACTTTATTGCCGTTTATTAGGGCTGCTAATGATGATTTGTACTATTAAGGGCTGCAAAGAGTTATTGAAA
CGTATATTTATAATAAATTATATTTAGATTTAGTTGGTGGTGGCTTGTAAAATATATTTATATTTAAAGA
ATTATAAGTCATAAAACCGTTCAACTTGGCAACATTTATTTTTATTTATTGAAAAGATGTAAAAATTGGA
CCGATTTAGGAAAGTGGGAAGAATACTTGATTTAATAAAAACAAATAAAATTTTATAAAGAAACAAATCT
TACATGTCTATTAATAGATGTTGGTTCATAAATATTTTGCATATTTTTTTTAATAAGAGGATGCCTTAAA
ACCAATTTCTTTAGGTAAATAATCTATATCAAGTTATTGCACACTAAAATAGAATATAAAACCCTATAAA
TAAATATAAATTTATTTACAAAATGATTGATAATGTAATTGGAACAAAAATCATGAAATGCATGTTTTTA
TAGACAATTTCTTATGCTTTTTTTTTTTTAACTCTATAGAATTATAATTACTAAACTTGGTAGGAGGTTT
TGATATTTACAGGATAGTTATGTTAACTCATGTTTATTATTTTTATATTTTTTAACTATTAGTTTTGACT
TGATTAAGTTGATATTAAATTTAATTATCTAAATTAATGTCAAAACCATTTTAATTTAAAATCCATTTTA
ATCATAATTTTTTAGATTAGTCTATTAAATCAAGACAAGTTTAACAACTATATATAAAACCATGAAAAAT
CAATGTACAACCAAATAGGTTAAAAGGAAAAAGAAATGATTTACAAAATGTTTATTATGTTTGTGTTGTG
ATACTAGTTGCTTTTTAAAATATTTTTTATTTAAAAATATATTAAAATAATAATATTTTTTTATTTTTTA
AAATTTATTTTTAATATTAGTATATCCAAATTATCTAAACATATAAAAATTTAATTTTAAAAAAATTAAA
ATTTATAAAAACACGCAGTGCGTAAACAAACACAACTTATATCTCAAATAACGGTCCCATCATACCCGAC
CCGACCATTCAAAACAAACCAACCATCCCAGCCGCCAAAGCCGTCCAAATAAAGATCCGACGGCTGAAAT
TATAAGGAAAAAAAAGTCAAAAACCAAGTCAGCAAAAGCCGAAAGAGTCCATAGCCCTCAAGGCCAGAAC
ATGTAGGGAACACAAGTGAAGTCATAAATAAAATAAAATAAAAAAAGGCTGTCAGCCAGCCAGGTCACCC
TATCTTTTCTCGTGGTGGAAATGATTCCCCTGCCTAAAAATTTAGTCTTAATTTCATTTGCATTTCAAAA
ATCCCTTCCTTTCTATCTGTCTCTCACTATATATAAAATCGTCGTCTCCTTTCCTCAGCTAACCCTTACT
CTCTCTCTCTCTTTCTCTCTCGCACCAGCAACCGCAATACAAACAAGCAATTTAGGCCAGGCCACGTCTA
TAGCTAGATTTGGCTTGGTTCGTTCTCTGATTATTCTCTCTTATACTTCTCCGATTAAGGTAAGTAAAGG
ATCCCTTTCTCTATCTCTTCGTCTTGGTTTGAGCTTTGTAGATCGTGTTTTGGTTAAACGCCGTCTTTTT
GTTGTTTTTGGTTTGGAATCGGTAAGTTTTAACGTTTTTTTGTTTCCGATCTATGATTTTTGTGCTGTCG
AAGGTTAGATCTAGAGGTATTTGGTGGTTTGATTTGGATCGTTTGATTTGAGAGCTTGATCTGATTGTGT
TGAATCCAGATCTGTATGTTTTTGTGACAAGTTATTAGATCTGTTTGATTTTGACCTACTTCGTTTGGTC
ATTGTTAGATTATAATCTGCCAGTGTGAATTAGAAGACATTGGTAAATTGGAAATGATGTGGTAATTGAT
TGAGATTTAGGTTGCATTTCTGTGTTTTAAGCTTAAAATAGATGATTTTCGATGGATATTTGGATTCTAT
TATAGTAGGAATGATAACGAAAGATAATCATGCTGATTGGATTAAGCTTTGGATGGTTAATGATTTGGAA
TAGTTAATTGGCTAGTCTATTTTGATTTTTAAATAGTGGAGGAACTAGATATGTTGTATTTGATTATATG
CTTCATAGATATGTAGATGTATTTGTAAATTATGTAGAATGTATTTTTCTGGTGTGAAGTTTGTTTCTTT
TACTCATTTATTGACTTTTTGCACAGAACTTGTAGAAA
Sequence ID: 6
Sequence Length: 3354
Sequence Type: DNA
Organism: Poplar sp.
AACAACTGGAAGTAAGACATGACAAGAGAGAGTGTCCAAAAGATTCCCATCCTCCAAAATTCTACTGTCA
AGATGAAACTCAAAGCCTTCTTCACTTCCCTCATTCTTCTTCTTCCTCTTACCTATGAACAGCAAAGCTT
GCTATATCCCCGACCACTGCTGACATGAACTCATGGAGTTCTTGATTTCATTAAAGGAGGCCTAGCCCAT
GGTAGAATTTTCAACAGGCCTAAACAGAGGTTCTGTCATACGAGCTGCCCAATGGAGAGAGTTCGAAACA
TGAGAAGAAAGCCCAAGTTAACCAAAAAAAAAAACTTGTATTTTTTTAAAAAAACATATTTCAAAAAATT
GGATTAAGAAATTTTTTTATATAAAATATTGAGTTGAGATGTAGAACTTGGGACTGTTTTGGAATTTTTT
TAAATATAAAAATATATTAAAATAATATTTTTATTTTTTTAAATTTATTTTTGACATAAACAAATTAAAA
CGATTCAAAAATACTAAAAAATTAATTTAAAATTAAAAAATAAAATTTTTCAAAAGCATGGTTAGACCAT
AAATGTTTAATTAAATCATTCATATTTTTAATTTGATTTATCTATGAAAATAGATTATATCTCGTAAATT
TGAAGCAAATATATATATAGATTTATGATTGTATTTATTTCAAATACATGAACCATGTTATTATTTTATT
TGATGATAAAATATATATTCAGACCAGTTTATGTGTCTTACATTTAGCATTTTTTTCTGAACAATTTTAA
TAAAAAACAAATACTCTGGAAGGATCCCAGCGTGTATATAATGGAGTTGAGATTTAAAATTATATTAAAT
AAGAATAAATACTAACATAAATTCATAATTCTTCTTATTGCCAAATGAACCAGCCAGTCACCCTTGGAAA
AATTCTGGCAAAAGTCATAAATCAACGAGAGTTAATTGGGCATTGAAAAATAAGTAAAGGATTGATCGAG
GTATATATATATTTTTTATTTTTTAAAATACAATAAAAATAACTCAATTATTCTTCAAGTTAAAGATTTT
GAAACAGATAAATAAGAGCATTTATATTTTTTTTATTTTTTAAAGTACAATAAAACTTTACCTTTGAAAA
AAAAACATGTGTATAAGGGGCCCTTGGGTCTTTTCATAATAATTTTTTTTTTTTGTTATTAATGGTTTTA
TAAAAAGTAATTTAATCTTTTTTATAAATTAAATATTATTTAAATTAAAAAACGTTTTGGTGCATGTGAG
CACTCGTGCATTTTTAGACGACTGGTATAATGTTTTTATCGTCTAAAAATATTCTTGGAAGTAATTTTAT
TTTATTTTTGATTGGTGTTTCAACTTTAATTTTTATTTTATTGATTTTATTTTAATTTTTAATTTTTAAT
TTTTTTATAAAAAATTTATTAGTTTCAGTTTTATTATTTAATATTAATTTTTTATGTATCATTTTTACAA
TTTAATCTTTATTTTTTTATTTTAATTTTTTATTATTAAATTATTATTATTTTCAATTTTATTTTTCAAT
CAAAATTTATTTATATTTTTTATTTTAATTATGATAATAGCTGAGACTTGATTACTAGAATTACATATTT
ATCCTTATAACTCAGGTTTAGTCATACCGATTTCTTCCGTTGTCTTACAATTTTCTTTAGCAACTTGGAA
AAAAATATCTCTGCTGTTTTGAAGTTGAAAAAAGAAGAAGAAAATGGAAAGCATCAGTAGATATTCTCCA
AAGTAAAGCAAGGCGTCAAGCAAGCAAATCCTCCACTTGCTTCACTGTCAGTCCAGTGGCACAATGCCCA
CCTGTTCCCTCTCTTCTCTCTTTTTGCTTTTGCTTTTAGCATTATTTCTCTGCACTTTTTCCCTTGGGAT
TGAAGAAAGAAAAGGAAGGAAAAGAAAGGAAAGTGACCCCTCTCCGTTTCACTCCCATCTCATTAGTCCA
GAAACTCCAACTTTTTCTTAATTTCTCTCACTTCTAATATAAAAGCAGTAACCACATTCTCTAGAGAACG
CACACGCTGTGAGTATACAACAGAAGAAACTTGGGTTTCTTTCTCTCTTTTTTCTTACTCCAGTTTCTTT
CTTCTTTGCTCTCAGTTTTGGCTTTCTATATTATCAGAATCTCAAGGTACGTTGTTTGTTTAAAGAAAGT
TTGTTTCTTGAATTGTTTGTAGTGTTCCTTTGCTTTATTCAAGAATTGGGTTTGCTTTAGCTTTTATTCT
TTCTTGGCTAGTATTAGTGCTTTTTGTTGATGGGTTTTACTTGGATCATAGTTTTCTTCCTTTAGATCTT
TTGTACTTGGAGGTCTTGGTGTTTTGTGTGCTGATTTTGTTGTATCATTGTTTTATCTGTGCCTTGTAGT
CTTCACAGTCAATGATCGGAGCATTTTGTGCTTAAATTTGTCAAGAAACTTGTTTAAATCAAGATCAATT
CTGGATTTATCGGAATCAGGATCATTAGATGCATGCTTAGTTGTTTTATGTTCAAGACATGCACTTTGGT
TAGTACAAATTGTACTAAAACTCTTAACTGCGTCTTAGGACCATTGGCCTTTGTTTTGGTGTTGCGATGA
TCAGGGAATCAGATTGTTTGTTGCTTTCAGTTGAAGTATTTAACATTTTGTTCAAAGTTTGTTTGTTGGT
GATGTGGAAAGGTCTGCTCATATTGTTAAAGTACAGTAATCAAGATTAATCATTGGTTTATCTAAATTAA
GATTTTATTTTTTTAATGCTATAGCGCTTTATGTTCAAAACTCTGCTGTAGAAATTGCACTAAAACTCTA
TTGGGAAATATCAATTTGTTGATGCTTATTTTATTGGGGTCTTCAATTTGGATTTCTTGTTTTTGCATGT
TGATCTAAGACAAATGTTTACCTTGATTCTAGATGTGAGATTTTCTGAACGCGAGTGTTTGCACACATGA
TTTGTGTTGTGCTCGAGAAAAATCAGTGACTGTTATGACTGGTGTGATCTTTATTATGTTCATTAAGCTG
ATCGTGGATTTGCATTAACCTTTGGGGTGGTGTAGGGATCATTGGCCTTTGTTTTGGCATGGCCATGAAT
AGAGAATTAAATTGTTGTGTTGCTGGTGTGCCCTTTGTCTTACTCAAGTTTGCTTTCAGTGAAAGTACTT
AGCCCTTCATTTAAGTTTGTTTCTCCATGATGTAAGCAATCATTTTCTTATTGTTAAAGTACAATAATCT
TTTGTCTTTCCAAAGACCAGTCTTTTCTGTTGAAGGATGAATTTATGGTTATTTTTCCAAATATTATTTT
ACCTTGCTATGATTCTTTGCCTTGACTAGATGGCACTACTTGAATTGCAGGATCACTATAAACC
Sequence ID: 7
Sequence Length: 2000
Sequence Type: DNA
Organism: Poplar sp.
TCACATTAACTTCTTTTGTAATTTACTTTAAAAAATAAAGAAGAAAAAATCTGTTGGAAAAACTAAAGAA
AATGAAAGAAAACGAAAAGCATCACTGGAGATACTGTCCAAAGTAAAGGAAGGAAGGCAAGCAAGCAAGC
AAGCAAATCCTCCACTTGCCACACTGTCAGTCCAGTGGCACAATCCTGTTCCCTCTCCTCTTTCTCTTTT
TGCTTTTGCTTTTAGCATTGTTTCTCTTCAGTCACTTCTTCCCGTGGCATTGAAGAAAGGAAGAAAAGAA
AGTGACCCTCCCCTCCCCACTTCACTTCAATCTCATGAGTCCAAAAATTCCAGCTTTTTCTTGTTTTCTT
TCACTTCTTAAATAAAAGCAAGCACATTCTCTAGACAACTCATTCACTGTGAGCATACAACAGAAGAAAC
TTGGGTTTCTTCCTTTTTTGCTCTCAGTTTTGGTTTTCTATTTCATCAGAATCTCAGGGTACGTTGTTTC
TTTAAGGAAAGTTTGTTTCTTGAATTGTTTATAGCGTTTCCTTGCTTTATTCAAGAATTGGGTTTGCTTG
CTTGCTTTTAGTTTTGATTCTTTCTTGCCAGTATCAGTGCTTTTTACTTGTGGATTTTAGTGTTTTGTGC
TCTGAATTTCTTTTATTATTTGATTTCTGTTGCTTTATAGTCTTTATTATCAATGATTGGATCTATTACT
TGGATCATTTTGTGCTTAAATTTATAATATCAATTGTTGATTATTGGAAACAGGAACATTCGATGTATGC
TTTGTGTGTGTTTCATGTTCAAGACTTGTGCTTTGGGCGGTAGAAACAGTACTAGGACTCTTAACTGCAA
CTGTCAGTTAGCGTAGTGCTTATTTGCCGGGTTTTTGGACATGGACTTCTTGTTTTCTGCTAGGACATAT
GTTTACCTGGGCTGTGGATTTGGGATTTGTTGATCATGAGTATTTGCATTTGTGGTTTGCGCTGCATGCT
ATAAAAATGAGTGATTGATATGACTGGCATGTTCTATTTTGTGCTCATTTAGCTGATAGGCGATTTCGTT
AACCATTAATATGGTGTAGCAATCGTTGGCCTTTCTCTCAGGATTGCAATGAACAGGGAATCAAATTGTC
GTCAGTTGAAGTATTTGACATTTTTTTCAAAGCTTGTTTCTTGATAATGTGGACAAGTCTGCTCTTATTG
TTGAAGTACAATAATCAATGAAGATATTTTTTACGTTCAAGACATGTAATTTGCTATAGAAATTGCACTA
AAACTTTATTAGGGGTCTTGAATTTGGACTTCTTGTTTTTGTATATGGATTCTAAGACAAACGTTTACCT
TGATTCTGGATACGAGATTTTCTGAACGCAAGCATTTGCACACTTGATTTGTGTTGTGTGCAAGAAAATT
GGGTGATTGGTATAACTGATGTGATCTTTAGGGGGTGTTTGGTAGGGGATTTATGGTGGTTAAATTTTAC
CCTTGTCACCAAATATTTTTTTTATTTTTCCACTAACTTTTAACCCTTCAATTTATTAGAACACCAAACA
TTCTTACAAACCAATTTTGCCAGCCTTAAAAATTGCTATTGTAATAATTACTCCAGTAATAATTCATCCT
TCTTTTTCATAGCCTAGCACCAAACACCACCTATTATGCCCATAAGCTAACATTGGATTGTGTTAACATT
TGAGGTGGTGTAGGGAGCACTAGCCTTTGTTTTGGTATTGCCACAAATAAAGAATTAAATTGTTGTATTG
CTGGCTTACACTTTGTCTTGCTTAAGTTTACTTTCAACGAAAGTACATAACACTTCGTTCAAGTTTGTTT
CTCCAAGATGTAAACAGTTCTTTTCTCATTGTTGAAGTACAATAATCTTGTCTTTCCAAATACCAATCTT
TTCTGTTGCATGGTGAATTTATGATTATTTTTCCAAATGCTATTGTACCTTGCTATGGTTCTCTGCCTTG
ACTAGATGGTACTACTCGACTTGCAGGATCAGTATAAACC
Sequence ID: 8
Sequence Length: 2000
Sequence Type: DNA
Organism: Poplar sp.
TTTGTTTTGTTCTTTAGGTGCACCTTTTCCTGTTTTGTTAGCATTAATTGAAATAAAAATGACTTTCTTC
TTCCAGTGGGCTTGTAAAGTATATTCTACTGTGATCATTATGAATGTTTTCTGCAAAAGAACTGTGACGA
GCAATGACATAGCTTTTTAGTTGAGTCCTGTAATATTTCTACATATGAGATGAGATTTTTTTCTTCCTGG
ATCAAATTAAGAATAAGCTAGTGAGAATCCTGGCCGAAGGTAGAAGAAATAGCACTGCTCTCTTTCATTT
CTTTTCCATTTTAGAAGCCCTCACTTCATCTCCCTTCCATCAGAACAGTTTTTGATCGAGGAAGATACTC
CAGCTATGTATATCAAAATGGATATATATATAATAGTTTATTTGGTTACCTTAATTTTCCTGACAGATTT
CCGCGATACATGGGCATTCCTAGATGATCGAGTGAAAGATGCTTTTGATCTCAAGAAAACCATTCAGGAG
GTAGTCTCTTTTAGTTTTCTATGGTGTTCTATATCAACTTATTTTGGGAATTTTGGCCTTTCTTGGGAGG
GTAAGGTAATGTGGTTACTTTACTGCAGGCAATGTATATGGCAGAAGCTGTTGGTGCTGGAATGGGGAAC
TCTTTCCAAGGATTTGTAAGGAGAGTTTTTCAGAGGTGAACTATGTATCAATGTCACACATTTTCACTTT
CTTACCCTTTAAAATGTTATCGCCTATGATGAGAGATTCAAACTAGGAGAAGATGTCTTCATGTTGAAGT
ACCTTTAGTGGTTTTGCAATTTTTACTCCTTTTAATATCTGAGGTTGCTGTCCGAGGTCAACCATGTAGC
GAATTTCCAGCCCTGTAGGAATTGATTATTTATCCTTTCAACAATAAGAAGTTAAAGATCAAAATGATCT
TACAGGAAATAAATTATCTCCATTTTCAAAAGCAACTACCTCGCAGCAATGATTTTTGTTGATTGATAAT
GAGATGCATTTATATTTACATTGCACCTTGGAAATTCACTTATCCTGATGATAGTTTGTTCAATCAGATT
AGCTGACTGTTTTGAATGTGATTGAGGTCAGACAGTTACGGGGGGGAAGAAGAAGCAGCTCCCTTCTGCT
TCCTGCTTTTTCCCAAAGTCAAATCTGTGTCTTCTCCTCACCATTTGGTCTCAGTACTCTACGGATCCAA
TTTCTCACATTTTCCTTGCCGCATTTATCACTTGAACACCGTATGCTCTTGAAGATACAAGCCAAACTCG
AGCCACAACAATTTAGCAACAATTTAGAAATCAGCTCACATTATTCACAAGTTTCAGCCCTTCATCATGG
TGGAACCTCTGTTTATAGAACCCTTTACTATCCTGGGAATGCAAAGTCTTTCAAAATCTCCAGTACTCTC
AGCAATTAACGAAACTCTGCTGGAGAAACCAAGAAGTCAACAGACACAGTAGTAAACTATAAGCTCGCTG
TTCAAGCAACTATTATTAGTAAATCAAGCAGAAATAAAACCCAGTTCAGACTTCGATTTCTCTTACTTTT
CAGGAGATCGAGAGTTCTTGTTTATTTTCTGTTAGGTCTGGTCATGCATGTGGCGAGAAGGTGTACGGTG
ATACGGTCAAGGCTTAATACTTACAACTGAATATTAAACATTTTAGCAAGTTAATTCTTGGAACGCCCGT
TCCTGACATATTCTGTACTGTGTCAACAATCTATCCATGGCCCAAAAAACAACATGATGTGAGCATAAAT
CAAGCAAAATCACCTCCGATGTGAGACGAAGGGTACGTAAAAGGTGCCTTTCAACCTAGTCTTGTAAATA
TGCTGACATTCACTGGAAGCAACCGGAAGTGGGTGATTCTAAGATTCATCCTAAAGTTAGAGTTTACCGC
CGTTCTCTTCCACCGCTTCCTCTTCTTAAATATCACACATGTCCGTGTACTCTCTACCTTCTACAGATAT
TCTCTGTCAATCATCTAGATCGAGTTTTCATAGCACAGGC
Sequence ID: 9
Sequence Length: 3000
Sequence Type: DNA
Organism: Poplar sp.
AACCAAAATTGACATTTTATTAAAAAAAAAGATGCTAAATAGCATGCCACATCGTGAGAGTATGTTTTTC
TTGTTTGCATCAATCGCTTAGCATTTTAATCCAGTGTTTGATCATCGTTAACAACTCTTTTAACATTTTT
TAGGTGTATGATGACCGATTAGTTTTATTGAACACATTGATCGAACTTTCAATACGCACTTCAATTTTTT
TATCATCAACTCGAAATTTAACATCTCTAACATGTACTTTTTTATGCTTGAGTTGACTTTTTTCTCCAAC
CTTCAGCATAGCGTGGGGCCAGTACTAGTTATTTAACTAATTTGTATGATTTTTTTTTATATTTCCTAAT
AGATTGTTTTGAACGAAGGAATACCTCTTTGACATATAACAATCTACTAGATCATTGGTTTGCGCTATGC
TATGGGTCAGATTAAATTTTTTAACATAAAAAATGTTCATGCATTGCTAATGTTTTTGCTAATAAAAAAA
AAGTTAATCATGAACTCAAAATATTATGCATGTTGTATGATATCTTTTGTAAATATTGATACGGTGATAT
ATTAGATTGACCTAGATTAACCCGTCAAATTTGTCATTCAGGTTATAAGATCATGATAACCTTATAGAAA
ACAAAAAAAAAAGTCATGATGGTCAATTTCTAATTCACTCAATGTTGAATGATGAAATTAAAAAGAATAA
ATAAAAAATGAACAAAAAAACTACTCAGGTCAACTTGGCAAACCAACAACCCGAGTCATGAGATTGAGAT
AACCCCGTAACATACAAATTAAAAAAATATTATGAAGCTCAATCTCCAACCAATCCAAATTTGAAGGATG
AAATCGAAAAAAAAATCAATTAAAAAAAAGATAGGTTAAAATCAAGAGAAAAAAACTGTATCCATGAGAC
CGGGATAACTCCATATATAATAAATTGAAAAACAAATACGAAGCTTAATTCTCAAACAACCTAACATTGA
AGATATTGAATGATGAAATTAAAAAAAATAAAAAAGATTAAGTTGTCGGAGGATGAAATTGTAAAAAAAT
CAATCTAAAAAGAACAAAAAAATGAATAGAGTTAACACGGGACAACTTGTCAAACTCGCGACTTGAGTCA
TAAGATCAGAATAACCCCATAAAAAATAAAAAAATAAAATTATGAAGCCTAATTTCAACCAACCCGATGT
TGAAGGAAGAAATAAAAAAATTAAGTAGAAAAAAACGGTAAAAAAATACCCGAGTGAATCTGGGTTAACT
TGTTAAACCTGCAACCTATATCATGAAATCGAGATAAATTCATAAAAATAAAAAAACAAAATTAAAAAGC
CCACTTCTAACAGATCTAATGTTGAAAGTTAAAATAATATAAAAAAAACTAAATCCATGAAATCAGTATA
TAACCCAACAAAAAATAAAAAAAATTATGAATCACAATTCCCAAAATAACCTAATATTAAATGATGAAAT
TGAAAAAAACCTAAATAAAAAAAGTCTAGGTTGTTGAAGGGTGAAATTAACAAAAAAAAATATTATTCTA
GTGAATAGTGTTTTATAAGTGTGACTATAGTGATTTAACCACATCTTTTAATGTATATTTGATATTCTGG
TAGTTTTTTGCGGTTACGATTTGAAAATGTATGTTTAAGAAAAGCTAGAAATTGTAGCTTTTCAGCAACC
AAGATTTTAATAAAGAATTTTCAAGAAAACACATGCAAGCTATGAAGTATGTTGATTACCAAACACTTTC
AAAACTGTGGTTGAGGCAAAACATAGTTTCAGGCTTTTAGCCACAATTCATCATACTACCAAACATATAC
TTAATATTTTGTTAATTGAATCTCTCATATATAGACAACATTTAATATTTTGCAAATATATCAAAAATTT
CAATCACTTAGGATGTTTCTTTCAAGGCTCTAATATTTTTTTTATAAGGGCGACTAGCTTTGTCAATTGC
TCGATAGTTTTTCCATCACATCTGATGATCGAAAAATTAGAGTTAAATTGATGGATTTACAAAATCATTT
TTCAACTTTTTTTTCATTAGAAAACGCCTCAAAAACCTTATTGAGACCTCAATAAATCCATTTTCAATCT
CAAAACACTCTTTATTCACTCCAAAAAAATGAAGATTAAACAAATAAAAAACCTTAACTGACACCGATCT
ACTTTCTTTGGCATGTTCATAGGAAAACATTGTCTTCATTGAACTCCTCTTAAGAAGACAAACCTATTGA
CTCAAAAATCAACCTTTTTGGTAGCCAAAATATTACAATTCGAGCACTTTCTCTACCCTCTAACATTTTT
CAATGACTTTCTTTCTCTTTTCCTAACCAAAATATGACCATCACAACACTTTGTCTCTCCTTTATGTTTT
TCAATGACTTTCTCTCTTTCTTTTTTTAATATCTAAGGATTAAAATGTGAATACGATAAAGTTTGATATC
AAAACATGAATGGTTAAAATAACTAGACTAAATGATAGAAAAATAAAACTACAGGGATCAAACTTATTGT
GGAATATCACTCAAAACTCAATACATGCGAGAACATGTAAATTATTTGTTTTTTTTTAAAAAAACATGCT
AATGTAACTTAGAAGAGTAAAATTGTAAATAATAAAACTTCAATGATAATTATTTATTGCGATCAATATT
TATTTTAAATCTAAATTAAAAAAATTAAATATACATAAATTAAGTTGAGAAAAATCGTGTTTGGTATTGC
GATCAAAATATTATATATTAAAAATTAATTTTATTTTTTTGTTTAAAATTATTATTTTTAATATTTTTAT
ATTATTTTGATACATTTGATATTAAAAAAAATAAAAAAAGTATTATTTTAATATTTTTAAATAAAATATT
TTAAAAATTAACCACAAAATATAAAGAATTACGGGACAGCCCAAGTCATCCCAACAACGTTCCTTAGCTG
ACTGCACTTTCAATTTATTCCAAAGTTTGAAGAAAATCATCATCGCAGAGCTGCCTCATC
Sequence ID: 10
Sequence Length: 2420
Sequence Type: DNA
Organism: Poplar sp.
AAAAAATGTATCTCTAACCCCTCTATCGATAAAATCGACAAGGTTTAGAGGCACTAATGCCTCCCTAAAC
TCTCAGGTAAAGGATTCACAATTTCTATTCTCTAGACTTTAATTCTTTTAAATCCCAGAGTATTTATTAT
ACAAAAAATAAGAAAAAAACACTCTTGTTCTTGTAATTTAAAGTTTATTATCTCGTTTATTGCAATCTTT
TACTTAAAAGTTACCGATTTTATCATCCAAGAATCTTTAAACCCCATCAATTTCTATTACCAATCATAAA
TTTCTATTTTTTTTTATAGGTGTTAGATCTTCTATTACCAATCATAAATTTCTTAAGCTCTGGATAATGT
GATATTGACATGAAAACATAATTATGTATTATCTAAACACCAAAACATTTTATCCCTAGGTATATTAAAT
TTTAGAACACCATGAATTACAAAACAGAATTGTAGAAACTAATTAAATGTTTTTAATCATTCTTAGCAAC
TATTTTAAGACATTCGTTAGTGGCTTATGATGGTTAAAGCTCGCCTTTTACATTGAACACAACTCCTTCC
AAAAAAAAGTTTTTTTTTACCATAACTAGCACAAAAAAAGAAGAGGGATTTGCCCTTTTTTTTAAAAAAA
AAAAAAAAAAAAAAAAAGAAGAAGAAGAAGAAGAAAACTAAGGAAAATCAGTAGCCTTTTTATCTTCTCC
TGTTCAAATTAAAAAGGAAAATAGAACCACAATTAGCGGTCGATTAATCCAAAAGTGATCAGCCACAAAT
AATCCGTCCCACGTTGTGTTTGTTATGCATGGCACGTCATACGCTTCATTTATCATGATACAATGTCAAC
CGTCAGATCCTTGACTGATTCCTCTAGTCAATGACGACTCCGTTGCATTGAAGGCGACAATCGAGGGTGT
AACAGACAGGTGATGATGGCCATAACACCACCTGAAAACACAGACCGACATGATCTCCAGACAGTTGGAA
ACGGAATGCTGAGTTGGCAATTAATGTTTTTTATTTTTTAGGGTTTTTTTAGTCCTTTAACAGAGACTAA
CTTGCTTCGTGATACAGAAATGTTTGAGAGTAAAATAATAATTATTTTTAAAAAAATATTATTTTTAGAA
ATATATTTAAATAATATTTTTTATTTTTAAAATTAACATATTAAAATAATAAAAATATTAATAATAATTT
TTAAAAATTAATATTTTTAAAAATACCGTTCAAAATATAATTTTAAAAACTCCTGTGTTCCAATTGATAG
GAAATTTTCAAGTATCATAAACTCAATTTACTACTTATAATAAAATAAAAAAAGGACAAATGTTAATAAA
GATAATCTAATGGTTTGAAGATGAGATTAAAACATAGAATTTCAACTTAAAATTTTAAATTTTAATAAAA
AAATTATATTATTAATTTTTATACGATCTGTATGATGGATTTGGAGTAGTAGAATAGTTGAGTTTTTGTT
AAAATAAGATATTTTATGATTTTCTAGAATACTTTTTATGAAATCATGATATGTAATAAATATTTAAAAA
TTATATTTCTTAAAATATGTAAGTTAAATAAATAATATTCACATATGATTGAGTTTTAGGCTTTGTAACA
TAATATTTTTATTTTAAAAAAAAACCTCAATATCAACGAACTACCCGTGAAAAGAGAAGAAAATTAGACA
CCAAAATGAGATAAGCAATGAAACGGTCAAATTGAGATTTGAGAGAGTGGTCAAAAAAATTTAACAAAAA
CCCACAATTAAAGGCTTGCAATACCCGAAATGCCCTTGTTTTACATCCGAGGTTAGAGGAGGCATTACAA
CAATCCCAAGAGCAAATCCGTCCATACGAACAAAACAACTGAAAGTGAGCCAGCTGTTTACACAATGAGC
GTGACGCGTCATGGGGTCCGTAGATCAGATACTGAGAACCAACGGCCAAGATCATTTCAAAGAGAATTTG
AGGTTCATTTAAGCTGAATTTCATTTGAGGCTGAAATTTCATTTCACATCTTCCCCTTTTTTAAAACTAG
AGGGCGGGTACCTTGAACAGACGCCCACACAGAGATCGAATCCAGATTTCTAAACGGTATTTCATTTGAG
TTTCATTATTTTCTTTGTTAATCTGGGGTTAGCTTAGAATCCAGCATTATCGATTCAAGCAATTAAAAGA
CTTTATCTTTAAATGTGGGCTAATTCAGTTTTGTAATTCAGCATTGCTAAGGTCTTGATCTTTGATGTGA
TTTTATCAGAATGAATATTCAGATTTTGATTGATGCTTGTAAAAAGGAAATGGGATATTCTTAATTCGCT
TTATTTTTGGATTTGTTTTTGTCAAAATAGTACATTAGATTGTTGTGATTCCCTATTTTTATAGCATTTT
AATGTAAAGTTGGCATTTTTTATGTGGCAGGTGAGAGGAA
Sequence ID: 11
Sequence Length: 3276
Sequence Type: DNA
Organism: Poplar sp.
TCCATTACTTGTTGCACATAGATTATGCTTTTGTTTATTTTGACAGTGATGAATTGTGGTGACTAATTTC
ATTTTTTCCCCTCATGCTTCTATTTTTCTTTTGGGTGCGTAGGATTGTTGAGAGTGTTGGTGAAGGTGTG
ACAGACCTCGAGCCTGGTGACCATGTGCTTCCTGTATTCACAGGAGAGTGTAAGGAATGCCGACATTGCA
AATCAGAAGAGAGTAATATGTGTGATCTTCTTCGGATTAACACTGATAGAGGTGTGATGCTGAGTGATGG
CAAGTCTAGATTTTCAATTAGAGGGCAGCCCATCTACCATTTTGTTGGTACATCAACCTTCAGTGAGTAC
ACTGTGATTCATGTTGGCTGTCTGGCCAAGATCAATCCTGCTGCTCCACTGGACAAAGTTTGTCTCCTCA
GCTGTGGAATCTCTACAGGTTGGGAAAACACCAATTCAATTATTCTTAAACGAACAAAGATTTTCTCACC
TTCTTTTGATGAGGATTTGGTTTCGTGTTGTAGGTCTTGGAGCCACCTTGAATGTTGCGAAGCCAAAGCC
AGGCTCCTCCGTGGCCATTTTTGGACTGGGAGCTGTAGGCCTTGCAGTAAGTTTCTTTTCCAATACACGA
AACAGATGATTTTTCTATCCATTTATGAGTTCTGATGCTAGCCTGCTACTTATGTTAAATTTGTTTTTGT
TGTTTGACATGATTAGGCTGCTGAAGGTGCTCGGATTTCCGGTGCTTCAAGGATTATTGGTGTTGATTTG
CATTCCAGTAGATTCGATGAAGGTAAAACAATCATTTAGTTTTATCATATCACTAGTTTTCTTTCGCTTT
TTCAGCTATTGCTCCATTGGTGTCTTTAGCTTGTCGGCTGCATTAGTTAATTATTATGTAAGAGAGGATG
TTGCAGAGAGGATTTTAGCATTGTCAACTTACTAGGATGAAACTGATCTTCATATTATCGAGTAGCTTCG
CAGTTGCTACTTGGTGATTGTGCTAAAATATTACACAAGACGTCATGTTTTTTATGTTCATATACAACTG
ATTTCTGATGTTCATCTGTGTTTTTTATTTCAACAGCCAAGAAATTTGGCGTGACGGAGTTTGTGAACCC
AAATGATCATGACAAGCCTGTTCATGAGGTTTGTAAGAAGATGAATCATGTTTGGAGGGATGATTCATAT
GAACCTTTTGCATCAGTTCTAATTTTGATTTTCCGTCTGTAGGTGATAGCGGAGATGACTGATGGAGGAG
TGGATAGAAGTGTTGAGTGTACAGGAAGTATCAGTGCCATGATTTCTGCATTCGAATGCGTCCATGATGT
AATTTTCTTTAAACTGTTTTAGTGATTATGGATCACTAAAAAAAAAGCACTTTTAAAACACCCAAATCTG
TTAACATTATGGATCTCTTTGCAGGGTTGGGGTGTTGCTGTGCTAGTCGGCGTGCCAAGCAAAGACGATT
CTTTCAAAACCAATCCAATGAATTTCTTGAGTGAGAGGACTCTCAAGGGTACTTTCTTTGGAAATTACAA
GCCGCGCTCTGACCTTCCTTCAGTTGTAGAGAAGTACATGAACAAGGTAACTTCAATCCCCATTAATCAA
TCTCTAGCCCGTAGAATTATGGTTTCCATTAGTGCTGATCGGAAGCAATCTGTATATGAAGTTTCTCAAA
ATATCTACTTGAATTATCATTAACAGTGACATTGTTTTATTTTAAGAACATTATCATAGGCAACAAAGCA
GCCATTCCTCCTCCTTTGGTTTTGAACATTCTATCATCATGCAAAAACCCTCTTATCCTAACTAGTTGTT
ATATGTGCAGGAGCTTGAGCTAGAGAAATTTATATCCCATGAAGTCCCTTTTTCTGAAATCAACAAGGCT
TTCGAGTACATGCTCGCTAAAGCTAGCCTCAGGTGTATTATCCGGATGGGTGCATAAAAGAAGAATCATC
TTTGTTGATTTTCAGGTGTATTGCCTGAGCTAGCCTCAGGCGTATTATGTTCCGATAGTGATCAGTTAGA
TGAAACAATAAAATCCATGCTTTAGATTGATAATTAAGTAAGCTGTTACCACTACACTTCCTCATGAGAA
TAAATAAGATTTTGACGTGTTTTTTTTACTAAAGGTTATCAGCACGTTCATCTATTTCACAAGAAGAAAA
CAAACACAGGAACAACACGTTTGAATTCCTCTCATTAGGCAAATCAGCTGGAGCCAACACTTTATTTTCA
AAGAATGATCAGGCGGAGCCATATTGGCCATAAGTGGTCAAGTTGCTAGAACATGTACTTCTTGAAAAAC
TCATAAAAGTGTCTGTCAACTTCTTCTTGTGTTAAAGGCCTCGTGAAAATACTATTTTACTCTTAAAGGC
CAGTTCTTTGTGATTTGTTTTGAACGGTAAAAGCATAATTAGGATGTGTTAAATAATAAATCCTGTTCCT
AAAGGATGATCCATTTACTCCCTAAATTATACAAAATTCCCGAGGTTTTTATTCTTCTTCAGTGAAAAAG
AAAAAACTGTAAGAATGATAAAGGGAATCGAAATTATGTAATGAATGATCCATTAGTACATTGTAATAGA
CTTTTTTCTAAGGCAACTTATTCTATTTAAATCAACAAAATCCATGTACTAATAAATTATACTATCAAGA
GTTATTCAAACTGGAGAGGTTTGGGATTATTATTATTATTATGAACAAATTGATTATTAGTGACAGCCAT
TGCTAATCAGCGTGAGGGTTTTGGGATACCACTGTAATGAAAGGTTGGAACAAGTCTTTAACAGCACAAA
AGATAGACTATAATTAGCAAAAACCACAAAGGCTAATTAGAGATTAATCCCCAATCGTGATAGAGATTTC
AGATTGATTTATCCACAAAGAGAAAAAGAAAAGTAAGCTGATTGGGTGATAAAATTGCAATAATTGCTAG
TTTTGAGACTGCATTAACACGAACATCTTAGTTGGAGGACTGATTTGTATTATCTAAAAAAAGAAACATA
AAACCAGAAACAGTCCAATCCTGAAACCAAGGAGCCGCAGGTTCTAAATACAGAGGACAGACAAAACAGC
AGAGATCGTCAATGGTTTTCTCTTTAAAAATCTTCAAATCGATAGTCAACGTTAAACATGAGAGACATAC
ATCCTTCTGCTACTATAAATACCCACAAGGAACAACCTCTTTCTTCACAACTCAAGAAACAGAGCAAACT
ACTCAAAGAAGCCTCAAAGAAAAAGCTGTTAAAGTTCGTTTAAGACAAGAAAGAAT
Sequence ID: 12
Sequence Length: 3140
Sequence Type: DNA
Organism: Poplar sp.
AAAAAAGCTCATGTGACGGTTGTGTATATGATCCTTAGACTTGAGATCACTAAGTATCTTATATAGAGAA
TGTTATGCTTTAATCATGTTACATGTTATCTTGATCGAGGTAACGAAATGACAGACATTGGGTATAACAT
GAACTATATAAAGGTACTTGAGTGATCAAGAGAACATTCATCACCCTAGGTGAATTAGGGAAAGTATTTC
ATTTGTTCTCAAATAGTATTGATTGAGAAATCATTGGTCAATGTGGAATAAGATTTAAAAAGAGTTTCAA
ATCTTATAAAAACGATCAATGACTATTATGTAAAGAGCAAACATGATTTAACATTGCAGATATACTATAT
GCTTTAATGTCAAATTAGAACATTATTTATGAAAGGATATTAATTACACTAAGAAACTAGTCACTGAAAA
GTTAGGTCAAACCACTAATGATTTTTTTAATATTCAATGGATCATGACATGTTGCTAGATGATGCACCTG
ATCTTCAAATATAAATTAATCAATTTTTTAATTGATAATAAATTAAATTGTTTAATTTATTTAATTCTAT
ATAATTAGAATTATAATTTATATTTGGGCCAACATATTAGGAACCTAATGGGTTACACGCATTAAGAACC
AACAGTCAGAAATTAAACTGAGATTATTTAATTAAATATGACTTAATTAAAATATATTTTAGAAATTAAG
AATTAGAATATAATTAATACAAGTATTATATTTCTAAATCTAGAAAAATCAAATAAGAACTTGATTGAGT
TAATTTTCAAAATTATCCTGAATTAATATATAGATATTATTCAGGGGCAAATTGACATTTTGTTAATTTA
TATGGTTTTTCAAATTTTTCTATAAATAGTAAGCTATGTCTCTTATTTTATAGATGTTTTATGTTAGACA
GAAAAACTACGTAAGCACAAAATTAGAACTAGCACTCAGGCATAACAATCCCTTTCTCATAAATAGGAAT
TTAAGAGATTTCTCATTGATGGTTCATGTGGATTGTTGTTGAAGGCCGGACAATTGGATAACTTGTGATT
TACGACAACCCAACTTTTAAAGAATTATTCAAAGCTGAAGAAGATCAAATCTTCAGGCAATAAATTCATA
AACAACTCTAGATCTATCTAACGAGATCCTAGGGACTCTCAAATAATATTGTTTCCTAGTTTCTGCTATA
TGTATGATATTTAGAAAACCCAACACCCGCTGCAAGATTAGTATGGCTATCGACCTCTTCGACAAATCTG
CCTACACAAAACAAACACAAAATTCTCTCTCTCCTAATCTAAGAAAACAACAACTAGTTATCAAGCAAAC
CAAGAAAGTGCTTGGCTGGAACATGTGTGGTGTGATTTTCTCTGTTAACATTTTGAGCATGACTAGAATT
TCTAGGGCTGAAGGAAGTTCTTGGTTGTTGTAAATATTGTTGGCATACATATAAATAGTGTAATAAGTTG
AATATTCATGATGTAACCCACAAAGGCACTATTATTTTGAATGGGGTAAACTTTGTTCTGTCACTGAGTG
AGGCAAAATGGTTTTAATTTTACATACTAATCTTCAAAAAATTCATATTAGAAATTATCTTACAAGATGG
ATTGATGATTGCTTATTTTACTTGTTAGATTATTATGTGATTGAGTATATTAAAGAGAATTTAGTTATGT
TTTTGTTATTTTTACATTTCAGAACTCTTTAGCCATTATTTCAAATATAATGAAGTTTTGTTAATAAATA
AATATTATTTGTTGACTCTTTTTGTGACACCAACTCTAAAGAATAAAATGTTTTTTGTCTTCAAAATTCA
AGTTATAAATTGTAATATTCAAAAACCTAGTTGCAAAGTTAAAAAAATAATCAAACCATAGGATTCTTAG
AGTAATTTACCCAAATTTAAAATGGAAACAAATTAAAGAATTTAATTGGGTTTTGAATGGGTTATCTCTG
GACTGATCGAGTTGCAAGTCAATCTAAATTTTTTACCAGATCTCACAAATCAATTTTATTCTTGTTATTG
TTGAAGCTCGACTTAACTTAAACTTCAAGTCATCTAAGTTATGAATGATCCAGTCAGATCAGATTAGACA
CTTTTTGAAGAATTGTAATTGCTTTCGATTACGTGTAAATAAGTCTTATCATATATTAATTGATTATTTG
TGTTTTGAGTGAGGATTTATAATCTTTATTTTTTATATAAAAAAATGAAAATAAAACGTTTGCAAAATAA
ACAAAAAAAAAAATTCTCAGGGCATTTTAAATGAGACGTTTTAAATTTTTTCCAGAGTAATTGCAGAAAA
TGTCTGTGTTTTCTCTATAAAAGAAATTCTTTTGACAGCCTGCACTTCATTAAAACAATAATAAAGGTAA
GTGTTTGTCCGGCTGTATTACAAGATTCTAAAAGGTCAACGACTTGCCGCTGCAGTGTAAAGGAAACAAA
CAGCAAAACCACAACTGGAAATACAAAATCTAGAAACGCTAATTGCAAAACAGTCCTTCAATTATGATAG
ATATTTCAATTAAATGTCAAACTATATACTCATTTTCAATTTTACCATCAAACGATCAATCGCTTAAAAA
TAATTTCCATACCATGTAATTTTTCTTTTGAGTGTCAAGAACTACTTCTATCGTAATATTAATTAAAAAA
ACACTACACGATAATTTTTTTATCACAAAATAAAATAAAACTTCTAGTTAGTTTAAGAAATTGTGAACTC
TGCCAAATGTTTGTCAAAACTACAAAACCAGTGACATTTGAAAGATAAATTTGCAAAATTGTTTCTTCAG
ATAGTATTAACAAAGTATAGCATAGTTTGAGGACAGGTTTGTAGTTAGCCAAAACCAGACACAAATTAAA
TAGAGAAACCAGAAAGCCAGAAACAGGGGGAGCCGTTGTTGCCAACAAGAGAGAGAAACAGAGGACAAAT
GAAACAGCAGGATCGTAAATGGTTTTCTTTTAAGAAATATTCAAATTTATGGTCAACATAATCCAAAAAA
CAGGAGAGACATGCGTTCTTCTGCAACTATAAATACCTAGAAAGACAACCTGTCTCGTCACAACTCAAGA
AACAGAGCAAAGTAATCAAAGAAGCGTTAAAGAAGGGTCTAAAGTTCGTTTAAAACAAAG
Sequence ID: 13
Sequence Length: 3140
Sequence Type: DNA
Organism: Poplar sp.
AAAAAAGCTCATGTGACGGTTGTGTATATGATCCTTAGACTTGAGATCACTAAGTATCTTATATAGAGAA
TGTTATGCTTTAATCATGTTACATGTTATCTTGATCGAGGTAACGAAATGACAGACATTGGGTATAACAT
GAACTATATAAAGGTACTTGAGTGATCAAGAGAACATTCATCACCCTAGGTGAATTAGGGAAAGTATTTC
ATTTGTTCTCAAATAGTATTGATTGAGAAATCATTGGTCAATGTGGAATAAGATTTAAAAAGAGTTTCAA
ATCTTATAAAAACGATCAATGACTATTATGTAAAGAGCAAACATGATTTAACATTGCAGATATACTATAT
GCTTTAATGTCAAATTAGAACATTATTTATGAAAGGATATTAATTACACTAAGAAACTAGTCACTGAAAA
GTTAGGTCAAACCACTAATGATTTTTTTAATATTCAATGGATCATGACATGTTGCTAGATGATGCACCTG
ATCTTCAAATATAAATTAATCAATTTTTTAATTGATAATAAATTAAATTGTTTAATTTATTTAATTCTAT
ATAATTAGAATTATAATTTATATTTGGGCCAACATATTAGGAACCTAATGGGTTACACGCATTAAGAACC
AACAGTCAGAAATTAAACTGAGATTATTTAATTAAATATGACTTAATTAAAATATATTTTAGAAATTAAG
AATTAGAATATAATTAATACAAGTATTATATTTCTAAATCTAGAAAAATCAAATAAGAACTTGATTGAGT
TAATTTTCAAAATTATCCTGAATTAATATATAGATATTATTCAGGGGCAAATTGACATTTTGTTAATTTA
TATGGTTTTTCAAATTTTTCTATAAATAGTAAGCTATGTCTCTTATTTTATAGATGTTTTATGTTAGACA
GAAAAACTACGTAAGCACAAAATTAGAACTAGCACTCAGGCATAACAATCCCTTTCTCATAAATAGGAAT
TTAAGAGATTTCTCATTGATGGTTCATGTGGATTGTTGTTGAAGGCCGGACAATTGGATAACTTGTGATT
TACGACAACCCAACTTTTAAAGAATTATTCAAAGCTGAAGAAGATCAAATCTTCAGGCAATAAATTCATA
AACAACTCTAGATCTATCTAACGAGATCCTAGGGACTCTCAAATAATATTGTTTCCTAGTTTCTGCTATA
TGTATGATATTTAGAAAACCCAACACCCGCTGCAAGATTAGTATGGCTATCGACCTCTTCGACAAATCTG
CCTACACAAAACAAACACAAAATTCTCTCTCTCCTAATCTAAGAAAACAACAACTAGTTATCAAGCAAAC
CAAGAAAGTGCTTGGCTGGAACATGTGTGGTGTGATTTTCTCTGTTAACATTTTGAGCATGACTAGAATT
TCTAGGGCTGAAGGAAGTTCTTGGTTGTTGTAAATATTGTTGGCATACATATAAATAGTGTAATAAGTTG
AATATTCATGATGTAACCCACAAAGGCACTATTATTTTGAATGGGGTAAACTTTGTTCTGTCACTGAGTG
AGGCAAAATGGTTTTAATTTTACATACTAATCTTCAAAAAATTCATATTAGAAATTATCTTACAAGATGG
ATTGATGATTGCTTATTTTACTTGTTAGATTATTATGTGATTGAGTATATTAAAGAGAATTTAGTTATGT
TTTTGTTATTTTTACATTTCAGAACTCTTTAGCCATTATTTCAAATATAATGAAGTTTTGTTAATAAATA
AATATTATTTGTTGACTCTTTTTGTGACACCAACTCTAAAGAATAAAATGTTTTTTGTCTTCAAAATTCA
AGTTATAAATTGTAATATTCAAAAACCTAGTTGCAAAGTTAAAAAAATAATCAAACCATAGGATTCTTAG
AGTAATTTACCCAAATTTAAAATGGAAACAAATTAAAGAATTTAATTGGGTTTTGAATGGGTTATCTCTG
GACTGATCGAGTTGCAAGTCAATCTAAATTTTTTACCAGATCTCACAAATCAATTTTATTCTTGTTATTG
TTGAAGCTCGACTTAACTTAAACTTCAAGTCATCTAAGTTATGAATGATCCAGTCAGATCAGATTAGACA
CTTTTTGAAGAATTGTAATTGCTTTCGATTACGTGTAAATAAGTCTTATCATATATTAATTGATTATTTG
TGTTTTGAGTGAGGATTTATAATCTTTATTTTTTATATAAAAAAATGAAAATAAAACGTTTGCAAAATAA
ACAAAAAAAAAAATTCTCAGGGCATTTTAAATGAGACGTTTTAAATTTTTTCCAGAGTAATTGCAGAAAA
TGTCTGTGTTTTCTCTATAAAAGAAATTCTTTTGACAGCCTGCACTTCATTAAAACAATAATAAAGGTAA
GTGTTTGTCCGGCTGTATTACAAGATTCTAAAAGGTCAACGACTTGCCGCTGCAGTGTAAAGGAAACAAA
CAGCAAAACCACAACTGGAAATACAAAATCTAGAAACGCTAATTGCAAAACAGTCCTTCAATTATGATAG
ATATTTCAATTAAATGTCAAACTATATACTCATTTTCAATTTTACCATCAAACGATCAATCGCTTAAAAA
TAATTTCCATACCATGTAATTTTTCTTTTGAGTGTCAAGAACTACTTCTATCGTAATATTAATTAAAAAA
ACACTACACGATAATTTTTTTATCACAAAATAAAATAAAACTTCTAGTTAGTTTAAGAAATTGTGAACTC
TGCCAAATGTTTGTCAAAACTACAAAACCAGTGACATTTGAAAGATAAATTTGCAAAATTGTTTCTTCAG
ATAGTATTAACAAAGTATAGCATAGTTTGAGGACAGGTTTGTAGTTAGCCAAAACCAGACACAAATTAAA
TAGAGAAACCAGAAAGCCAGAAACAGGGGGAGCCGTTGTTGCCAACAAGAGAGAGAAACAGAGGACAAAT
GAAACAGCAGGATCGTAAATGGTTTTCTTTTAAGAAATATTCAAATTTATGGTCAACATAATCCAAAAAA
CAGGAGAGACATGCGTTCTTCTGCAACTATAAATACCTAGAAAGACAACCTGTCTCGTCACAACTCAAGA
AACAGAGCAAAGTAATCAAAGAAGCGTTAAAGAAGGGTCTAAAGTTCGTTTAAAACAAAG
Sequence ID: 14
Sequence Length: 3000
Sequence Type: DNA
Organism: Poplar sp.
AAATGACTAAAGTAAACATTTTGCGTCAACTTTAAAATTGTCACTTGTTTTCTCTAATTTTTTTATTTTA
ATCCTTTACCTTTTAATTTGTTCCTTTCCAAAAAGTTCAATGAATAGATTGAAGGAAAAAGAAAATTGTG
GATTCCTCTAGACAACATCTATGCTTTTTAGGTTTTTCTTTTTTTGTAATTTGTATTTCACCAAGAGATT
TTATATCTGAATTTCATTTTTTTTATTGATAATATTTAAGTAGAATTAACTTATTTATATAAAAAAATAA
CATTAATGTTTAATAATTATTAAATAAATCAGTTTATCACATAAAGATATGGATCAACAGATCATCCTAT
ACATCAATCTTTTCACAAAAGTCTCTTGTTCATCTCTTCCCTGTTTCTTCCCCTGCCCAAGGCTATGACG
AGCTACTACAAGAAATATTTTCTGAAAAAACCAAAAACAAAAAAGAGACAAGACATTATTGTTAGTTGAC
CTGCAACAAATTAGTTACACAACGTATTATTACAATATAATGACGAGCTACTACAAGAAATATTTACAAC
TAGCTACATTACCAGCTCACAGGTAGGATAAAAAATAATCTAAAAATAATAATATTCAATCAATGTAAGC
ACATTTTTTTTTAAAATATCAAATAAAAAATAATAATATCAAATGATGAAAACAAAAGAAATAAGCAAAA
AAAAAATTATAAAATAATATCAACCCGTGTTAACTTATAAAACTCGTTCCTGAACCTTTTGATTGAAAAC
ACTAAACATGAAAAAAAAATACGAAGCCCAATTCCTAACAGGTTAAATATTAAAGGCTAAAATAAAAAAA
TAACTATACATAAGGATATGAAAGAAAAAATAATAAATAAAAGACAAAAAAGGTGTAAATCTACTTAGGT
TAATTCATCAAATTCAAGGGTTAAATCATGAGATCAGGATATTCTATAAAAAGAAAGACGGAGAAAAACA
AGAAGCTTATTCTACAAACAAAAAAAAATTGTCTAGTAATGAGATTAAAAAAAAAAAAAAGCGATGTGAA
TCTATGACCGGGCCATTTGACTACAAACACCAAACCTTGAAAAACCATAAAACCCAAATTTCAATAAATC
AAATGTTAAATGATGAAATCGAAAAAACAAAATTAATCACAAAAAAAAAGGTTCAAAAGAAAAAATAACA
TCTAAAATAATGAGGACCAAATTAAAAAAAACAAATTAGAGAATGGATAATGTTAGATTGAAGGGCTAAA
TTGAAAAGAAAAATTAATTTCATAAAATAATTAAAGAATAAGCCACCAAAAAGAATGAAAACCAAATGTA
TAAAAATAAATTTTTTTGATTAAAAGATGAGATTGAAAACAATTGAAAGTTTTAAAAAAATAAGGAACAA
ATGAGAAAACAAAGTCAGGACCAAATTTGAAAAATCTAAAAACAAAAAGCTTAGATTGAATGATATAATT
GAAAATAACAAAAAAAAAAACTTATAAAAGGGCCAAAGATAAATATTAAATAATTAAAAGAATGAGGACT
GATACTTAAATATACCCAACCAACAAGATTGCTCTAAAATTTTAAATGCTTGGTACGAATCTCAAGAGAA
AAGAGAAAAGAAAAGAAAAAAAAAACACCGGTGATAATCCGTCCATCAAAACCAAGTACCCACCATCTGC
TAAGGAAGAGTATGCCGAGAGATATTAAATGACATAGTAAAAGTAAATTTTTACCTTCTGTATGACGACG
TACACACTGCTGAAGTGATGAGACTTCTCTTATGCACTTAATAGGGTTTTTTTAAAATATTTTTTAATTA
TTATGAAAGACTAATTCACCCCTCAAAACAACTTTATTATAAAAAACAAATTTTAAATATAAAAATATCC
CCAAAGAAAGCTTTATTAAATTTTAAAATTATTTTAGGAAATTCACAATGCTAGAAAATATGAAATCTCA
AAAAAAAAAAAAACCTTGGAGACTTATTATCTATTTTTTTGCATTTAATAGTATTGAAGGGGTTTTACTA
TTAAAAAAAATCATTGTATCCCTAATCAAAACAATATAGACAAATGGATCACGTGGAGAATACCATTTTA
TCCCTAAGCTTAGTTTTCTAGGTTATTTGGTGAATGAAAAAACAATATAGGTTGGCCTGAGTGGAAAATG
TTCTGGTTGCTTAAGCAAGTGAATACAACAAAATTTCTTGGGAGAAGATCCCAAATCCAAGGGGAAGATG
AGTTCTTAAATGCAACTTCACTCTAAACTAATCCTTCTCCTTAAACAGATTGATTATTACTGGCTGCTAG
AGTCGGCATTGTATATATATATATGTCAACCAGCCGTTAACAAACCGCAAGATAAACTAAGAATAAATCA
CAAAACCACAACTGGAAATATAAAACCACCAAGTCTAAATAGAAATCAATCCCCAATCATGATGGCGGTT
TCAAATTGAGTTTCAAACTAGGGAAATCTTACTATCTAACTTAAAATCAAGCCCGCAAAGTTTAAGGTTG
CATATTACTAGGGAAAGCCAAGTTTTCTCACGCCTAGCATGTAAATTATATTCTTAGTATCAAAAACTAT
TTGATATCATGGAAAAAATAAAACTATAATCCATTCAAATAGAGAATTTTCAGTAAAAAATAAATGTAGA
AGGTAGGAAAAATTGAAATGGATGGTCACACTATATGTATCAAAATATGTTAAATAGAGGACTTAATTGT
AGTTAGCTCAAACCAGAAAAAACAGAAACAGGGAATCAAGAAACCAAGGAGCCGCAGGTCCAATACAGAG
GACACAACAAAACAGCAGAGATCGTTGATGGTTTTTCTCTTTAAAATACTTTAAATCAATGGCTAACCAT
AAGCATGACAGACACACATGCTTCTGCTACTATAAGAACCCACAAAGACAAACCTTTCTCTTCACAACAC
AAGAAACATAAAGTGCGTTCAAGTCAAGAAACATAAAGTTCGTTCAAGACAAGAAAGAAT
Sequence ID: 15
Sequence Length: 3145
Sequence Type: DNA
Organism: Poplar sp.
AGGGAAAAACTTACGTAAATCAATTTCCGGGGCCCTCTTGTGGACTTCTTGTTCGATCCAACGGAAAAAT
CCACAGGAAAAATCGATCATCCAATACTTTTATAACGAGCACTCCTTGACGTCTTTCGCCGGTAAGAAAA
AACTACTCCGCCGATATGGGTTGTTCGGATAAACGTGGATTCCATGAGCTGGAAACGTAAGAATTTTCTC
TAGGGGGTGGTAACTACAAGTGAGTCCCTGTTTGCAGTGAGGGTTTCATTCAAGTTCCTAACCAACAAAT
TAAGACACTTTATTTTATTCAATTGCATCCCTGTTAACATCAATTAGTCACAAGATTTTATTTTCCCTGT
TAACATCAATTAATCCCCCGTTAGCATTTAATTTTCATAGCAGGGAATAATATTGATATCATATTTTAGT
GAATTTTTGTAACTACTTGTGTATATGATGGGCAGTAACTTAATTTTGAAGTTTATAAACTTAATGAAAA
GTATCATTACAATTGGAGGACTTAATTTTCTATTAATTAATTAATTCAACTTTTAGGGATTTTAAAATAG
GAAAAGGGAAAGAGAGCGGGAAGAGAACGTGTATTGACATTCATTAGTTATGGGCCCACGGGTTGCTCTC
TTTTTTCTTTTCTTTTTTTCATTAAAAAAAGAAAATAAATTTTTTTATGGTCAATGAGTTGAAAATAAAA
TCTCCTAATATGACTTTTTATTTATATTTAATCAAGTCAAATAAAATATTATGAGATGAATATCTTATAT
CTATATTTGATTAATTAATTTAATTTAACTAAAAATAAAACATTTTTAATAAAAAATAAAATAAAAATTC
AAAATATTCTTGGTTATTTTTTAAATTAGTAAACAATCATATAAAAATCAAATAAAAAAATTAACGAAGA
CCAATGTCTAATTAAATAAACAATAAATGATGAAACTAAAAAAAAATATAAGCTTAGAAAAAAAAAACAA
ACCCTAAGAAAAATCTAAACTTAGATTAATCACCCAAACTCAAAACCCATGAAATTTTAGACTCATACTC
AATCAAAAAACTTGACTCTTAATCAATTTAACATTGAATGATGAAACTGAAAAAAAATATCATTTTTAAA
AAATCAACATAGTGGAAAAAATAACAATAAGAACAATAAGGATCAAATCTGATATGAAAATAAACCGAAG
AAGGATGAAAGCGTCAAAAAATTCAACTGTAAAAATTAATTCAAATAAAACAAATAACAATCAAAAGACT
GAGAATCAAATTTGACAGACAATAAAATTGAAAAAAAATGAAATTGAAAAAAAATCTTATAAACTATTTA
AAATAAAACAAATAGTAACAAAAGAACATGTATCAAATATGAATAAAAAACAAATTGAAGGGGTACTTTG
AGATTTTACAAGGGTGAGTGTAAGAATTGAGGATGAGAAAGAGAAAAAGAAGGCCACCAATACCAAACAA
GAAGTCCATTGATCACATGCATCATCTAGGAGTTGAAGGGCCAGTAGAAAGATTCAAATGCTGCCTTTGA
AGTTGACATTTTGCCGTTGGCCGACATCGTACGTTACGGTCGAATAGCACAATCACAATCATGCGTTGAC
GATATCCATTTTAATTTTTTTATAATATTTATATTTATAAAATTACATTAACATGACAATCACAAAAAAA
AAAAACCAGAATAAAAACACAAAAAAATCCTTTGATGTAAGAAAATTCAACTTTAATGTTATATAAATGA
CTATACTTGAAAAATAAAAACACAAAAGCACTTCGAATACCAATCTTAAAATAGAAATTGATTCGAAGGT
GATGTAGATATTTTACTATGCTATAAATGTAAAAATACGGAACTATTCCCCCGTAACACTGTAACGACAA
ATGAATTATTGTGAATAAATCATTTCACCTCCCTCAACTAATTATTCGGTTTGTTTTGAGAGCGACAAGA
AGATTTTTTTTACTGTAGATTACTATAGCTGCTGTCCCACGACTTTTATATTTTCTTATAATTATAATAT
GGATAGACCTCAGACAAGGAAAATCAAACCAGCATATGGTTGTGTTTTACTAAAGTACCCACCGCACCTC
TAACAAGACAGATGCATTAATGACAAAACAAAACTTAAGATTTGGATAAAATATATATAAAAAACGTTTC
TAAAATTAATTAAAAAAAACGATCCTGAAAACAAATAGAAGAGAAAATTAATTACGCGAAAATTGTACCT
TGACAAGAGAACGAAAAATCAAATCCACAAGCCATAAACCAAAAAATTAAAATCAAACATATTAATTAAT
TTTTATGATATAGTCGCGCCGAGGCTCCCGAGTTTCTGCGTTATTAGTGTCTTGTTCTACGAGATGCTTT
TGGATAGGATTTTGCTTAAACAGTGAATATAAAATGATGATTTTTTTTTAATGGTTAATATACAATTCTG
TTTTTCAGTATTTTTTATTTTAAAAAACATTAAATTAATCTTTTTTATATAAAGATATTAAAAATAAAAA
TAAAATTATTTTAATATATTAAAAATATTTTTTTAAAATAATATAAAAATATATTTTTAAAACATAAAAG
TAAATGAGCTATCATATCATTATCAGACGCCGATCTAGACTTCTAGTCTACTAGTCTACTGCTCTACAAT
GACAGATCCTAGAGGGGGAATGTACACACACGAAAATCCCAGCAGCAGGGGCGCCGAATGGTGTCCTGGC
TCAGTGGCCTGTAATTTTTTAATCATCATCCTTCATTATTAATTCTTGAATCCGTTTGTTTACGCTGCGG
CTGCGTTTTAGATAAATAATTTCGAAATCCCTGTTGATGATAGCTGTGCTGCTCGAGTGCTCCACTGTCT
TTCCAAAAGCAAATTCACCGTCGACTTGAAGGCCACGTGTGACCATAAATAAGATTAAAAGATAAGACAC
AGAAGAAAATCTCCCAAGTAACTACGAAACGTTAGGCGCCACCAGTAATCAAAACCACTTGACAAATTCC
ATCAGACCACTGTACTGCTTGCAGAGTTGTAGTCGTCATTAAGTTCACTATCTCTATAAATCAAACCACG
AGACGAGATAGTTGCAGCGATCAAAACACATAATCCATCATCTCAGAAATACAAAAGAAGAAGCC
Sequence ID: 16
Sequence Length: 3000
Sequence Type: DNA
Organism: Poplar sp.
ATGAAAGATATATTTTTTCATTTAATTTACTAAATTATTTTGTATAATTTCTTAAATTATTTACTAAATA
AGGCGGGATCTAAAAAAATGAGGAGAAATTATATATTTAGAGTTTCCATTCCCATTGAACCATAGTTAAA
TCATTTTTTTTTCTTTTATATATGTCTAATGGAAATCAGCTTCTATACATTAAGATTTAAATTCATCTCC
ATTCTAATCAAAGATATATTATCTAGGTTAAAATAAGAGAATTCATGATAATTTTATTTCTTAAATCGTG
ATTTGAGATTTCAATTCTTATTAGTTAAAGAGTATTATTGGTAATGTTTGGTTGCTTTCTCGGAATAAAA
ATGAATGAAGATAGTGAAAATAGAGGAAATATATTTTCATGTAATTCATGTTTTGAGATTTCAAAAATTA
ACTTCAAAATTATTCTAGAAACGTATTTTTTATATATTTGTGTCTTCATCTTTTTTTAATTAGACACATT
TTCTTATTATAGTTTTAAAATATAACTCGGGGTTGACCCTAGATAAAGAGTCATGGCTTGGAGGATCGTT
TCTAAAAAAAATTAAAAAAATAATAATCAAAATGATGTCGTTTAAACCATAATTGTTTTTTTTTTAAAAT
AGTCAGCAGATTGATGACCAAGTTTTGATCAAGTTAGGCCTAGGTCAACTGCAGTTTTTTACTAGAATAG
CTGAGGTTTTTTTTTTCTTCAATTCAAACTAGTTTAGATCTTGAATCAAAACAGGTTTTGGATTAACCTA
CTACTAGTACGAGTTTTAAAACACTAGTTTTTATTTCTTCTATTACTTTGTTCATGAACATTAACTAAAT
AACACAACCCCTAAGGTTATGGTGAAATCTCTTAACCGTTTGGGAACGCGGTTGAAACCGCGTTCCCTAA
ATTTTTTTTTATGTTAGATTATTTTGATGTGTTGATCTTAAAAATAATTTTTAAAAAATAAAAAATATGA
TTTTGATGCATTTCAAAGCGAAAAATACTTTAAACCGCAACCGCTACCACAATCTCAAACAAGCCATAGC
AAAAAGGCAAAAACCATGTCTTGGTTTTTTAATTTTAAAGTTGGAGTGGATTTGGGGCGAGACACAGTAT
AATTTTGGGTCGATTGGTTTTGTATTCTCTTGGGTGGGTCCATTTACTATGCTAACATCATCACAGAAGG
CCTTATTAATAGGTTGTATATTCTATGTGTAGCCTCCACTCCACTCCCACTCACAGCACACGACCCAGAA
TTTGGGCCCGCTGAGTTTTTCCTTCAAGAAAACAAAAGTGGGACCCTAAGAGTAGCTTTTGAGAAAAAAT
GTTCGATTAGTTGAATAATTTTTGTTTTTTTATATTGAAATTTATATATAATTACTTTTTAGATTCTTAT
TTTATATAAGTTAAAGATCTGTTTTTCATTTATTTTATATAAAAAAACCCATTTTACAACACTTTTAATT
AAACATGTCTTTTATTTATTTTTAAATCCATAACTAAAAGTATTTTATTTAAATCTATTTTTTAAAATTA
TAATCATAAAAATTATAATAATATCAAATACATATTACACGCATTTCAAGCTTGTTCATCAATATCCCAT
TTGAGACTCCATGCAAATGGTATTTATAGTTGTTAGACTTGATATAAAAAGAAAAAAAACTTAAATTATT
ACATTATGAGATCAATTATTGGATAAACCAAAATCAATTATTTAATTATTTTTTATATTAAATTAATTAT
TTTTAACTTGAGTGAAAAATCAATTAAGTTTGGCTAGATCAACTTTTATCAAATTAATATCTTGTTTGAT
TTAATTAAAAATCTAACTCGAGTTAAACTTTAATTCTTGTATTTTTAAAAGTGGCCATATCATATCTAAC
AATTATAATACTTACCTTCGACTATGTGGAAAATATTTCTTAGAAAACTAATCCTTAAATGAAATTCAAC
ATTTAATGGGGTCCTTTTTTTTTTAGTAAGATTAGGTTTCCATCTTACTAGATTAAATAAATACACATAA
GAGACGTGTGGTTTGTTCCAATTGGACGAAGATCTAATTTGACCTAATCTATAAAGAATTCATTCGGACA
TATATATTCATCTTTCTCGATAATCTTTTGCTTTAGTTGATAAAAAAAAAAAACCCTTTAATTTATGTAA
CATTTATTTAATTAGACAGAGCCACATCCTTTAATTATGACAATAACCATCTTCTTTGGATGCCGCTTTA
TGAGTTACGCCACCTTTTTATCTGCAGTGAAGCCTCGAATCTCTTTAAAATGGAAAACCAGGGAACAATC
ATGCGTGTTCCATGGGAGCCAAGACATGCAATGGAGACCCTGGATTTGCTTGCTTCCATCTATTCATCAC
ACCCTACATCTCTTTTCCCTTTACAGCAAACGAAACTAGCGGTGATCACTGACTGGTAATCACAAGCCCA
CATAAGCTCTGTTTTTATTAAGAGAATCAATCTCGTGCCCACAGGCCTCATCCATCCTTTGCTAAAATAT
TTGTCTAAAATTTATTTTTGATATGTGGGTTGAGCAATTTAGGAAACAATTTTCTTTTTTTTTTTATGTT
TAACAAAAGAGAAATAGTACACACACGTATTTGGGAAAAGAATAAAAACCATGTAGGCACGCAGAAAAGG
AGATTCTAGCGAAAATGTGATGAGGAAGAATCGAATGATTCTCCATAATATGTGCTGCATTCATTTTCTG
TTGCACAGATGTTATGGAGGATTTCAGCCATTTACTATTGTTTGTCGAACATCTTTAAAATGTATTTGGA
ATTTCTCATAAGAATATAGCTGGTAGAAAATTAAAGGCCAACTGGAGTACTAGATTCTGCCGCTATAAAT
AGTTAAATACCCCACAGAGCTACTTCAGAACTCAAGAAACAGAGGAAAGTAATAAAAGAAAACAAAGTTT
GTTGCGTCAAGAGAATAACGAGGAAGAATGGCAAGCACTGTTGGTCAGGTTATGCGAAGA
Sequence ID: 17
Sequence Length: 3086
Sequence Type: DNA
Organism: Poplar sp.
ACAATCCATCTAACCGTAGACTAAAATATATTATGTTTTATGATAACTCTAAGAGGTAACTCAACTGATC
AGATTTTTAGTTTGCTCTTTAATAATCACGAGTTCGAGTCCTTTCAGGGCCACTAGAGGCTTACATGACG
TTAATTTTAGGACCGTGAGATTAATCGAGGTACACGCAAACTGACCCGGACACCTACATTAATACAAAAA
TATGTTTTATGATGATTGAAACTAATTAGAAATTCATTATTAATAGAAAGCATATAGTTTGAAGAAATTA
TCAAACAAGATAAGATGGAATGCAAAATAATCCTTATAGGCAATAAGCTTTCAGCTACACTCAACATGTA
CAAAATAATCCCATATATAATTAACTTCACTTAAAGAATAATATCCATAAATTGATAAATATGCAATGAG
ACTTGAACTCAAAAGTTCATCTCTCTTAATTCCTAAGAGGAGCAGTTAACTTTGGATAAAAATTGAACTG
ATCATCATTAAAAAAACTTAAAAACAATGAATATTTTGAAAGCTCCAGCTCTCCTCGATCGAATCAGTAA
CCTTCTTGCACACTACTACCGGACCTGAAGCGTATTGGCCAAGGATACTATTTTGTAAAGGATAGATTGC
ATGCCGACACCCTCTATTTTGAACTGAAAGATTTTTGTTTTTTGTTTTTTTGTTTTTAGGTGAGTGTCTT
TATGTATTAAAATAGCAAGCTATATAACTATTTAGATAGTGACTCAGTGGTAAGAGCTTGAGATCAAGAG
GTTTGCTCCCTCTGTGGTCTCAGGTTCAAGCCCTGTGGTTGCTTATATGATGACCACTAGAGGCTTACAT
GGTCGTTAACTTCAGGGCCCGTGAGATTAGTCGAGGTACACGCAAGCTGACCCGAACATCCACGTTAAAT
TAAAAAAAAAATAGCAAGCTATATTCCATGAACAGGTAGCCATTTCCATTACAAAATTCAACTAATCCAC
AGCAAGTGGACTGTGGGACTCATCTTAATTGAAATTTATAAATGTTCGCATGTTACGATCGATCCATGGA
AGAGTAGTTAAGCAAAATTGAAAGATGGAATTTAAAAAGAAAAAAAAAAATAGTGCAAGCTCCTTCACTG
TAATATGAAATAGCTGGATTTCCCCATCATCAATTGTCACTTATTTATTTATTTATTATTTTCTTAAAAA
GAAAAACCATCTTGCCATTTGCTATCTAAATTACAGCGCCGAACAAAACAAATCACACAGCACATTGGTA
CTGAACGGGTCCTTCGTATAAACAGAAAATGATTTTAAAAAGGGGAAAAAAACACTATAATATTTCTTAG
AACAAAAAACTTAACATCTACGAATAAAATAAGCAACCATTTGCTCTAGTAGATGAGATATTTGTCCTGC
AAGGATCTGGCCTTCTCTGAAAACGCCGCGTTGTGTGTTTATACGCCACCCTGCTAGGTGCTATCTAGAG
CGAAGCCATGAGTCCCCATTGGAAAGATCTAAAAGGTGACCAAACACTCTTGCATAAACAAGTCACTAAG
GACGAAGCCATGAATCTATAAAGAAAAAGAAAACCAACAAAACCAGCTGTAGAAATGGAAAACCAGTAAC
CTTCATGCCATGGCGCCAATGAGTCTGCTTCTACCAAATCATTGCCACTAATTCCAATTTAGATAAAATA
AGGATGGAAATTTAATTCATACCCGTTCCTACTACGTCAATACCGCCACACGGTATTTCTAATTTAGATA
AAATAAAAATAATCAATAACCATGGAATACAATCTGAATGAGTTGATATTTTTTAAAATTAATAGAGTAT
GAATATTATTAAACTCGAACCAAAACTTAACCCGGAATATATATATATATATTTTTGTAAATTATCTAGA
TTTTTTTTAATACAAAATAATATATACATATTGACTTAAAAACATATATATAAATAATATTTATCATTTA
ATATACATATACATACTTCAAATATATATATATATATATATATATATATATATATATTAACTATTTTATT
TTTTTATTCATAAATTATAATAGATAACAAATACTCATTGGATAATAAAAATTTAATGAATAGTTTATAG
ATATTTAAATTTCTTACTTGATAAATAATGAAGAGAGTATAAATATAAAAAAACCCAACTCATGGGTACT
CATTATATCCCTAGATACAAACAAAACAAGCATAATACTAATAAGATTCTTATAATTTTTTTTATATCAA
AATAGATAGTTTCGTTCTGTTTTAATTGAATTTAAAAGGATAGATGTGGTCCTTGTATATATATATATAT
ATATGAATTATGGTCTGAAGATATTTTAATAAAATTAAAAAAATTGATTAGTCCTTGTATATATATAAAA
TACGGTTTGAAGATATTTTAATAAAATTAAACAATTTTGATATACGCTTGATATATAATTAAAACATTTT
TCGAAAATATTTCTATCTGAAAAGGAAAACAACATATGTTTTCGGAAAACAAAATGTCGTGTACAGGGAA
AGATTCAAAATTAGAGTTTTTCAAGTCTAAGGTAAAGAAAAATCATTGTTTTATAAATTCTGAAGTAATT
TCTAAAGTTGTTTAAATAGAAGTTAAATCAACCTAAATTAAATTAAAGAGAAATCTTTTTATAATAATTA
GAAAAAAGAATTTAAAAACAATATTCTCTAAACTAAACTTGAATATATTCCTGACTTTGCCTGACCTAAA
AAATGGGGTGAGATAATCTAATTATTAAATAAAAAATTATAACTATTTTTATATAATTGTTTTTTTAACC
TTGATCCTATCCATCTGGTCTGTATCCGCTATACATTCAACGTAAAAAATGCAAGAAACTGTTTCCCAAA
GACTTCCAAAGGGCAATGCATTTCAAAGGCACAGTATTAGGAGGGTTTCAAAAATTTTGATTAATTTATT
TTAATGTATTAATTAATATTAAAAATAATCCACTGTCCCAACACTTAGAATGCTATAAATACCCCTCAAG
AACAAGAGGAAGCTAATCGAAAGGAACTATTTGTGACGTTAAAAGAAGCTAGAATTTTCATTTTAGGACA
GAAAGA
Sequence ID: 18
Sequence Length: 3027
Sequence Type: DNA
Organism: Poplar sp.
AAGTTAGGAAGACCATGTATGCTTATCAAAGAATTCATTGTATGGCTTGAATCAGTCATAAAGGTAGTGG
TATAAAATATTTGATACTTTTATGCTTGGACACAGTTACTTTAGAAATGACAATGATAGTTGTATGTATT
TCAGAAAGCTCTCAAATGGTTCATTTATGTACTTGTTAATGACATGTTGATTACCTCCAAGAACATGTAT
GAAATTAACAATTTGAAGAACTAATTGAGTGGTGAGTTTGAGATGAAGGATTTAGGTACAACCAATAAGA
TCTTAGGTATACAAATATGCAAAGATTGAAGTCCTAACAAGTTATACTTGTCACAAAGAAAGTATCTTAA
GAAGGTACTTGAATGTTTTGGTATACAAGATTGCAAGCCAGTTAGTACTCTACTTACAACCCATTTTAGG
TTATCTTCAACTTTGTCACCATAAACTAAGGAGGAAAAAAGCACATGCTAAATGTTTCATATGCTAGTGT
AGTAAGGAGCATTATGTATATTATGGTCTATACTCATCCAGAAATTTCACATGTTGTTAGTGTAGTTAAC
AGGTTTATGATAAATCCTAGTAAAGTTCACAGGTATACCATGAAATGGATGCTCTACTATCTTAAAGGTA
CTACATATATTGGTTTGATATATAACAAGAGTAGTGGCACTAGAAGTAATGTTAAGGGTTTTGTAGACTC
AGATTATACTAGTAGTTTGGATAGAAGAAAATCACTAACAAGTTATGTTTTCACTATTTTAGGGTGTGTT
ATTAGTTGGAAAGAAATTTTGTAATTCATTTTTTCCTTGTCAATAATAGAGGCTGAGCATATGACATCGA
CAAAAGGAGTGAAACAAACTCTATGGCTAAGAGGTTCGGTTTGTAATCTTTGTTTATCACACGAGTTGAT
CATTGTGCATTATAATGACTAAAGTGTTATTCATCTAGCTAAGAACCAAATGTATCATGATAGGGTTAAA
TATATTGATGTCAAGTTTCACTTTATTCTAGATATCATGTTGTAGGATGTTATATCAGTGAAGAAGATTG
TTATAACAGAAAACCCTGCATATATATTGACAAAGCCTATCTCTGCAGTCAAGTTTAAGCATTACTTGAA
CTTAATTGGTTTGTGTAGTACTTGAGAGATGCTTGGTGGAGGCAATGAAAGAGGAGTTTAAGTTTCATAA
GTTGACTCCATTTAAGCCAAGGTGGAGATTTATTAGGTTTATCTTAAATTGTAGCAGCTCTATGGGAGGA
AATAAATACCTATGTTAACCTAATCCATATAAAAAATCTAAAGTTATCATATTTACAAGTCAAGGCTTAT
TTGTGAGTGTTTAAATTCTTTATATTTTTATGGCTAGATAGAAGAGAGAAAATATGAGTTTTGAGTTACT
TTGGAATTTGAAATATTTTACTTTTTCAAATGAATTTTTCTAATAATCTCATCCACAGAGTAGATTTAAG
TTGCCAAACTATAAAAATTTTATTAGCTCCTGTGTAATTAATTATGTTTATTTTTTTATATTTTTCTTAA
ATTAATTTGAAATTTTAAGATTGTTTTAATTCCCAAGATTTCTATTGTGCTTCACTTTGATGACATAATG
TTTAGTGGAGTTAGCCATGGGAATTGAAAGGTTTCCTAAGAGGGACTTCATAGGAATTAATAGACCATTG
TAAAACTTTTAAAGAGTTAAATTATTCATATATTATCTAACCCAAAAAAAAATGCTTAAATACTATTTTT
CATCTTTTAATCGAAAATTTTCAAAATTAGATGAACTAAAGCTGTTTTACAAATGATTAGCCTCTTTTCA
TTCAAAAGATATTTCAAACTTATTAATTATTTAAAAGAGAAAGAAAAAAAGAACAAGAAGAAACTATTGT
TAGTTGACCTATAATAAATTAATATGTATTAATTATATAAGTCAACTTGCAGTTAACAAGCCAAAAGATA
AAATAAGAATAAACCACAAAACAACAACTGGAAATATAAAACCACAAAGGCTAAAGAGAATCAATCCCCA
ACCATGATAGAGGTTTCAAATTGAATGTCAAACTACAAAATCTTTCAATTATACCCTCCTACTATCATCT
CTTAAAATCAGTCCCTAGTTGCATCTTACAAGGGAAAGCCAGGTTTTCATACGCCTAGCACATAAATTAT
ATTTTGAGTGTCAAAAACTATTTGATATCATAGATAAGAATTTGTTTTAAGAATATAATTTATACAAATA
GAGAGTTTTCATACGCCTAATGTTTTCTTCGCAAGCTATATGTTTTCTGGTAATATGATGATGTTGTTTC
AAATGAACTAATTTGATTACCAAACAAAGTTGACCTTAGTGGAAAGGGTTAGTTGTTTAAGCAAGTGGTC
TCGTGTTTGAGCCCTTGTTAATGCAGCAAATTTTCTTTGGAGAAGTTCCAGTTTTGATACCCGACGTAAC
CTCAAAGGGAAATAGGCTATGGATGCCTTGAAGAATAAAAAACAACCAATTTGATTAGGAGTTACAATGA
TAGAAAGATTTTTTTATTCATTGAGGAAAGATTAGGATCAGAGGAGTCAAGAGGAAGATGAGTTTTTAAA
TCCAACTTCACTAGAAACTAATCCTTTTCCTTAAACAGATTGATTATTACTGGCTGCTAGCTAGAGTGGA
CATTGTAAATTTATATATATATATATATATATATATATATATATATATATATGTTAACGAGCCGTTAACA
AACCGCAAGATAAACTAAGAATAAATCACAAAACCACTACTGGAAATATAAAACAGGGAATCAAGAGACC
ATGGAGCCGCAGGTCCAATACAGAGGAAACAACAAAACAGCAGAGATCGTAGATGGTTTCTCTCTTTAAA
ATACTTGAAATCAATGGTTAACCATAAGCATGACAGACACACACATGCTTCTGCTACTATAAGAACCCAC
AAAGACAAGCCTTTCTCTTCACAACACAAGAAACACAAAGTTCGTTCAACACAAGAAACATAAAGTTCGT
TCAAGACAAGAAAGAAT
Sequence ID: 19
Sequence Length: 3065
Sequence Type: DNA
Organism: Poplar sp.
TTTACAACATATATATGTTATATTCACACGGATTATTTCTTAATTTTTTCATATAAGATATTAAAATATC
AAATATTTTTTTTAATTTTCCTGGTTTGATGCGAGTCAACTTATGTAACCCAGGACCCGATCCCCTGGCC
AGGTCAACCCCAAAGTCGGGTTTGATAACTATAGTTGTCATGAAAATATATTTTATGATTTGTTATGTTT
TTTGAACTATCAAAATACATTTATTAATCTGCATAAATAATTTTTTATAAAAATAAAAATATTTAACCCG
TGATGAAGCGCGGGTGAAATAGCTAGTAAAAACTAAATAATGTTTAATTGTAGGCTAAATTAAAAAGTTG
AGGGAGTCATTTTCCATTCGAACTCGAGCGCGAGGGGCTCTCCCCAAGGAGAGAATAGTCTCTTACTTTA
CGACACTACTTGTGTCTAGATAGTTGATCTTGAAAAACGTCAAAAAAGAAATCTAATTCGTGATTTCTCA
AGATTTCATTTAGGAAGGATGTCCAAAGATGGCGACATGATGTTGTCATTTGCAAGGCAGTAACACCGAC
TTTTCTAGAGCTCATTTTGACTCACAAGAGTCTCGTTACCCATCACTCAGTCCATGATGATTATTTGTTT
TTTTAGTTGAAATTTAATTTAATGTGTTTTTCATGTTATTTTTCATGTGTGTTTTAAATGATTTGAACGT
GTTTATATAAAATAAAAAATAAAATAAAAACATGACGCATTGCATTACCAATCACGCACATAAAATCCTT
CTTCTTTATCCTCTACTATTTATACATTTCATGTTTCTCGACAAAGCTTCATGGGCATGCCTTTATCATT
TTTTTAATAAATTTCAAGACAACAACGGTTATTATATGCTATATATATAAAATCTATAAATTAAAAATTT
TAAGTTTTGATTAAATTAAAATCCTACTCAATTTTCTAATAAACTCTTTTATTTAAGTTCAAAGTTATTT
CTAACTAGATATATTTGTGATTTTTTATAAGTTAAGTATAAAAATAACTAAAATTATTTTACAAAAATTA
TACCAGATGAAACGTAGTTTTACTCCTTTTTTTCCCCTCTCGTTTCCTTCATATTATTTCCCAAATATTC
TCATACACTAAACACATTGTTAGGATCCTTGCAGCTTAGAGTTGCTAATCAAGCCCTTTTAATTAAATCA
ACTTTAAAACACTTCTTCATCATAAATAAATTAATTAATTAAGTGCTCCTGGAGTTTTTAACCATCTTCC
TTGCTAATCTAAGTAGGTATAAATTTGATTTTTTTTCTTTCTTGAAATTATTTTTTTATGTTTTTTAATT
ATTTTAATATAAAAAATTATATTTTAAAAATAAAAAAATATTTTGATATATTTAAAAAAATTATTTAAAA
AAAATCATTACTGCACTTCGAAATGTCATTTTGAAACACGGTGCAATTGACTTTTCTCAATAATCTCTAA
ATCTTTATTTAATAGCGAGATTACTGTCACACCAAAAAGGTCTAAGGCTTTTTGAGCCCAGGTCACTTCC
CTTGCACTCACCTGGCTCTCAAATCTGTCACCAAAGCCCACAAAAGCCCACTTTTGCAGGCTTGTTTCAA
AAGCCCGAAATCAATACGAGAGACTCACATCTCTAAAACCCAACTAATTTAGAGCAGGCCCACCACGAAC
CCAAGTCACTTTCGCGAAGAAAGTTCCAAGTAGAGGCATAGTTGTGGCCCAGGCTCTGAAGTCTGAACTA
GTTTAGGCCTAGATACATCCGAGTGAATTATTATTATTTTTAATAGTATTATTTTTTACAAAATTCAATA
GTCTTAAGTATCAATTCATTAGGTCGTCAGTATAAAAACAAACAGTTCAAAATAAAATTTAATTTAAAAC
AACTCTTAAATTATATATCATAAAATCCATTCCACAACCAAACTAGATTTTGAACCTATTTATTTTTATA
TTTCAAAAATACTTTTTTAAAAAATTAAATCGTTTTACTTCAAATTAAGTTTTTTTTATATTTTAATTTT
TTTGATGTTTTGATATTAAAAAAAAATTATTATTTTAATATATATTTTTTAAAAATATTTTTTTTAAAAA
ATACTACCGTATTATTTATATTTCGATTGATGATTTGGCTTAGAATAAACTTAAAAAATTCCAGGTAGGC
TTGGCAGTTAAAATAATTGTATTTATCATTAAATAAATGATTATTCCATTGCATTTAGAATTTCTCTTGC
AGAACGTGGAACATGCCTATTGGCTACCACAGAGTTGTCAAAGCAATGACCTTGTACGAAAAGATTTTGT
TCCTTCTTGGTCATAAATTATAAATCTGGCTCACTAATAATTAATAAAATCATTTTTTATATTTAATATC
AAACAATATATTTTTTATTGGGTTTATGATTTTTTTCTGTTTGATAACAAAATATTTAAATTTTTTTTAA
TCTTTTAAATTCATATATTAAAATTAATATTTACATTTAGATGATATATTTTTATTTTTTTCTAAAATAT
TTAGATTAGGTTATAATGAAATTAGGCTGGGAGAGATTATATAAAAAAAATATAAGAATTTAACTATTGA
ATATTTGGTCATAAGAATTTTAGAATTGTAATACTAAGAAAAATAATTCTAAACTATGATTGAATTCTAT
GAATGACTGTTAATTAAAGTATGATAAATAATATAAAATAAATGATAATATTAATACATCAATACTTATT
TCATTATTATTAAAGTGTTATTATTGATATTATCATTTATTTTTTGTTCAGTAATAAAAAAATATTATTC
AATCAGTTAAACAATCTTATATCAATATAATATATTCATAAATTATCTTAATAAATTATTTTTATAAAAA
AACCAAATAACTAGTTTTTTTTTTTTTTTTTAATATGATGGCCTCTTATTAAAAAAAAAGAAAAAAAAGA
AAGAAAGGGGGAACTCCTTGGCCCCTATTTATCTATAAAAAACATCCACACCTTCTTCCACCGCCACTCT
CTTAGCTCTATAATTGACTTCCACTGCATCCATCCATCCATCCATCCATCCATCC
Sequence ID: 20
Sequence Length: 3000
Sequence Type: DNA
Organism: Poplar sp.
CTAATGGGTTAAAACCAGAAATCAACTAACATAAGTTCACTAATGAAATAAACTTTTAAACAATGTCTAA
TGGGTCAGAACAAACCTAAATTAAAGATAATTATTCAACATCAAATAAATAAAATAAGATAATAAAAACA
AACTCTTTATGGTAGAATTCCTCCATGTATCTGAAATCTCCAAGCTCTCCAGAGTGGTTTTTTTGCCGAA
ACGTTTAGTGGAGGAATTCAACTAGAAAACTTTATTTTGATTACTAGAATTCACTTTCCTTGTATTGCCT
CCTCTTAGTCTCTTTGATGTGCTAGAAATACCTGCAAAATAAGAAGAAAAAAAATCAAGGAGAAAGATCC
CCTTATTAGATGTCGTCACATCAACTTCATGTAGGACTTGGAATCCTCGCAAAGTATGGACTTCAATTCT
TCAATGAATTCAAACCACATTAGGAACCCTTGTAGCCCAAGACCATGCACAAGTTTAAGGCCTAAATAAA
CCTAATTTAATATCCATTTGTTGTCCAAAACTAACCCATTACAGGTCTGAATCGAATGGGCTAAAAATAG
CCAAAAAAGAACACTTTGTCGATAAATCTGTCAAAACAGTAACAACAACTTTAAATAATTTATTCCCGAA
CTTTGATTGACCTGAGATTTTATCACACTATAGTTTCATATGTTTAATACCTCATTATAAATTTTAAGCT
CGATTTCAATATACAGTTTGAAAAATATATTTGATTTTGCAAAACTGATCTATTTAAAAGCAAAATTCAT
ACCCAACTTGGTTTCTACCTTAAAAAAAAAAGAAAAAAAGATTAATATGTGAATTACACGCCTAGTAGTG
TAGTGATTGCAGAAGTCCAAAAGCAGTCACATACCTAAAACCCAACTGAGATGTAAGGCAGGCCCACCAC
AAACCCAAGTCATTTTCGATGGAGAGAGCACAGAGGAGTTGTCACCTTCGTTCTGCTTTGAAGGGCCTAG
TAGTTGTTGTTTAGAATTTGCATTTCTCCTCTGATCACTAAAGTTCAAACTTCAGAGAGTTGAATATTCT
AAAACGAAAAATCTGTGCTAACATCTTGTCATTATCGGCAGACACAGGCAGGCAGGCTAGATAGGAGTTG
TTTTGCATTTTTAATTTCACTTTGGTACACTTTCGTGCAGCGTTTCGTTTTGCATTTGAGCCATCACCAC
CTCGAAAGTCAATAGTCAAAAGTCAGTCCAGGGTGGCCTAACAACAGTTCAATAATTGTATTTATCCTTT
GGTGTTTTTTTTAATAAAAATTTAATTTTTTATATATTTTTGAATTTTTTTAATATGTTAATATTAAAAA
TTATTTTTAAAAAGTACTAAAAATATTATTTTAATATATTTTCGAGTGAAAAGTATTTTGAAAACCAATC
ACTACTACATTCTCAAATACCTCGTTAATCATTCATTTTCAAACCTCAAATGTTTTCTTTAGTATTCTAT
TAATTATATTATTTAAGGTACAATATTATCTTTTTCTTTTATATTTAATTGTTTCACACATGTATTTCAT
TACATTTATAATTTTCTTTGTTCGTAGAACATGGCGGATAAACCCAAATTTAAGAGCCTATAAAACCTAA
TATTTTTCTCGGCTCATCGAAGTGAATGACCCATTTCCTTTGGGCATATCTACATTTCCTCTAGTGTGAT
AGCTTCATTCTCCATGACAGCTTGAGACGGTCGACCTCAAAAACATAATAAAACCCTTGTTTTATGGCCA
AATATATAGCACCATGGCTAAGTATGAATTCTTCTATAATTTCACCTTACCCTCCTAGAAAATTTTCTAA
GTACGAATTCCTCCATAGTTTACCTCTATATACTTAGAAAATTGTTTTTCAAACATGGGACATACCCTTA
CACACTCATCGTACTAAGTATATTAACCGGGGTTTTCACCCCGCTTCTCAAAAAATATTTTTTGACAAAC
TCGTCGTATTGACCATATTTACAAGCCTTTGCGTATAAATATCACAACGATTTAGGGGGGCTATTGATAA
ATTCAAATTTAAGGGTCTAAACCCCCCATAAAACTCAATCTCATTTGGGCTCAGTCAAGGGAAGGACCAA
CCTCTTTTGAGCACAACTACATTTTGGATCATACTCTCTCTACATACATTAGGTGTATAAAAGTCTTCAA
AGGACCCACCATATTTCTATCGATATTAATGCATATATTAGGTATTTTTCTCTCATTAATATACATATGT
GAGGGATATTTTTTCTTATTAATACATATATCAGTGATATTTCTCATCAACATCAATACATATGTCATGA
ATATTTTTTCTCTTTAATATTATCAGGAAAATATTACACTTTAGTCATTCCTCTGCATAAAAATACTTAT
GACTATAAATAGACCATAAATTCTTTAAACAAAAAGTTTGGAATTTTCATTCTCTACTACATATTTATTT
TCATATTGTCTCTGTAATATTATTGTATTTTCTCTTAAAAAATCACTGATTTAATCATTGAAGAGTACCT
TAATTCACTACAAATTATCTTTTACAAGTATTAAATATCTTGACTAGAGATGACAAATCAAATTACTAAA
ATCAAGAATTTAACTAATTATCTAAAATATAAACCTTATCCCAAACTAGTAGGAGGTTTGAAGACGTCAG
CTGGATATTAATTGATCACATTCCTTCTCCATCGCAATTTATTAAATTATATTAACACATAAAAACTGTG
CTATATATTGTGAATGGGTACGTACGTACGTCGTTTTGGTTTAATATATATTATAATTATAAGTATAACT
ATAGTAATTAGAAAAAAATAGAAGAATTTAACTTTACAATATTTAGTTACAAGCATTTTATTTTATTTTA
TTTTATTTTATTTTTTTAAAATCCCAGTTACTTATCTTATATAAATCCCAGTCCTCTTTGAAGTTCCCAC
CATTTGCAATCTTCAATTCTTTCTCTCGTTGGTTTCTTCTGTTGACTTCACTCTCCATCC
Sequence ID: 21
Sequence Length: 3022
Sequence Type: DNA
Organism: Poplar sp.
GCTTGCACACACAGCCACATGCTAGCGAAGAAGGAACACAACTGCTTTTAACTTAAAAGAAATTTAGAAA
TGTATAGTTTGCAAAGGAAAATGCTCGATGGCTCCTTTGGCTTTGGCCTTTATGATTTTTTGAATTTTCA
ATATTGTTGGAAAAAGTTGTGGTTTGGAACGTATTGATTAGGGTATCACAGGCTAGCTTTCATTTTTCAT
TCTAATTAAGGAATTAATTATTTTCTTTAACCAAGTCTTGTATAGGCAATCCATGTTAGAACTAGTATAT
TAATTCCCAAGAAATTTTTTATTTTATTTTAAAAATGATTATATTATATGGAAATAAGCAGCAAAAGTCA
TTTTTGGAGTCCACCATAGAATGGTTTTTGGTTGGAGCTTAAATCATTCACAACATGTGCTGGATCGGCA
CGCAGCTAGCTAGCTAGCTTCTGGTGTGCTTATGCATGGATGTGCTGATCTTGATATCTTGTGGAGCAGC
ATCATCAGCAGCAGCTTCAGCACTCAAAGGGGTGCTTGCCACAGCTAAAAAGTTGTACTTCAGGAAACAA
AAAATGAGCCTCCATTTTTCACAAATCTCAACCTTTCTTTGTAAACTTTCGATCAATGTTGTTTTGTGTG
AGCATAATCACTCCATTAACAAGGTCACCGCATTATCGTACGCAGAATTAACCAGAATAATTCTTCATAA
AACCAACAAAGATTGGTTGTAGTAATCTTGAAAAACTAATTTCACCATCATTTATAAAATGTGTCAAGTA
ATAACTCAAGCTTAGAACAATGGACTTTTTCAAGAAACTAATAAAGCTCTGCAGGACCAATCAACATATT
CTATGACCATTCTGTCAATTTTTTTTTTAATTTTTATCACAGGTAATTTTTGAATTTTTTTGCCCCTTTC
TAACTGTTTCATTATATATATATACTAGCTTTGATACCCGCGCGATGCCGCGGGTTATTTTTTTTGCATA
AAAAATATTAAAAAAAATAAAACTTTAAAAATCTTGGGTTTTTCTATAAAGTTATACCCAAGAATTTTGG
ATTTTGCTGCAACGTCTGACCTAAGAGTAATATTTATAATATTAATAATAAAATTAAACTTGTATGACCC
AAGTTTAAGTGAGTCTGGCTGTAACACCGGACCCAAGAATACTGGATGTGGGTCTGGCTATAAGGTCGTG
TCATAAAAGTGTGATAACTAAATAGATTAATTAAAAAAAACAAAGAAAAAAAATCAACAGGAAGGAAAAA
ACTAATGAAGAAAAAAAAAACATTGAATTAATTGGGTCAACCTTTTAAACCAGGTTATCCCGTTTTGCGT
CATAAAAGTTTGATAACTAAATAGAAAAAAAAATGATGGGTTTACCTAGAATTAACCGGGTTAACCCATC
AAACCAAGTTAACCCGTCAAGCCCAGGATACGTGTCATAAAAATATGAAAGTCTGATAATTAAATAGAAA
TAAAATTAACTTTAACAAACTAAACTAAATGAAAAAAATAACTCGTCAAATCAGGTTAACCCATCAAACC
CGAGATTCGTATCATGAAAATCTGATAACTAAATAAAAAAAATTAACATTAACAAACTAAATCAAACAAA
AAAAATTCATTAAAAAAATAAAAAGAAAAAACAAAAGAAAAAAACAGTTATATAATATAATACAATATAA
TAATTATTATAATTATAATTATAATGAAAAAAAGTGGGGAAAATTTTAAAAAATGAAAAAAAAAGTGGGG
AAAGCTAAAGTTAAAACTAAATTCTCAACCAACTCAATATTTTAAAAAAATTAAACAAAGATAATTTAAA
AAAAAAACATGTGGGGGAAACACTGTAGCCAAACAAAAACCATGTAAGGGAAACACTGTAGTAATTCATA
GTATTTTTTTTTATAAAAAAGCTAGAAAACTAATCTCTCAACCAGCTCAATATATAAAAAAAACCGACAA
AGGTTATCTAAAAAAAAAGAGTCAATTTTGGGTAAAAGAAATGAAAAAAAAATGTACAAAAAAGGAAACA
AAAGCGAAAAAAAAACCACGTGGGGAAAGCTACAGTGTTTTAAAGAAAAAGACAAAAAAACTAAATTTTC
AACCAGCTCAATAGTAAAAAAATAAAATCAACAAAAATAATTCTGAAAAAAATAAAAATAAAAAAAAATA
AAAAAAAAACTTATGGGGAAAGCTAAAGCTAGATTATCAGCCAGCTCAATATTGAAAAAATAAATTCGAT
AAAGATAATTTTTTAAAAAAATATATGAGGAAACACTGCAGTAAAACAAAAACTATGTAGGGGAAACACT
GTAGCAATCCATATTTTTTTTTTTAAAAAAACTACAAAGCTAAATTCTCAGTCAACTTAATATAAAAAAA
TAAAATCTACAAAGACCATTTTGAAAAAAAAAAGAATAAAGAAATCATAAAAAAAAAATAATATATGAGA
ATATTATAGTAATCTATAATGTTTTAAAGAAAAAAGCTAGTTAAATTTTCAACCAGCTCAATATTTAAAA
AAATTAGCAAAGATAATTTTGAAAAAAAAAATTAAAAAAAAAACAAAAAAAAGAAGAAGAAATGAATTTT
GGGTAAAAAAAAAAGGAAAAAGAACGAAAAAAAAATATGAGCAGTTTATAATTATAATATAATATAATAT
AATAATAATTATTATAATATTCTTATTATAGCGTGGGGAATGGGGAAAGTGGGGAAAGTTAAAAGGCGTG
GGGAAAGCTACAGTGTTTTCCCCACGCCTTTTAGAGTATTACTTAATATATATATATATATATATATATA
TATATATATTCACCAACTACCAAACTAGAAAAAAGAGTCCCCACTTCCCAGTACCTACCAACCTACCTAC
CCATCTTTGTTTCCTGCCATTAAATAAACAGAGAGAAACGCAAACTCTCATTGATTCTACCATCTCGTTT
GCGAAACCTTCAAGATTCTCTTCTCTGCCACCATATCCCTTTGAAAAAGCAATCAAAATGTCATCTTCGA
TCAAGCAACCCA
Sequence ID: 22
Sequence Length: 2846
Sequence Type: DNA
Organism: Poplar sp.
CAGAATCAAGAAAACAAAAGGGAATTAAAAAAGAGAGCCCCCCTCCCCAATTCTTGATGTAGTATAAAGAATTC
ACTTAAGGAGAAGTAGTCGTGCCACATTTCATATATGGGGGTAGTGTCTGTCTCCCTTGTGCACTCCATTGTCA
TGTCCGCTTGAAGTCATGATGGACCTCATGGCTCTTCTTACTTGTGTCAGCCGATCACTTTATGTTATCCCCTC
AATTGTATTGTCATTCCATTTCCTCGGGTGTCATCAATGGTTAGGCTCTTTGTCCTGACTATGTCTGTGCTGGA
AGCCCAGGGGTCTGCGTGTAGGTGTATGAGTGAAGGCCGAGGATTGGTGCCTTTTGAAATTCAAAGTACTTGCC
ATCTATTTGCCACGTCTCTCATTAGTGGTGGACGTGTTGAGGGGCAATAGGGATGAATCATCCATTCAAGTAAA
CAATGCCAACATTTTTTGCTATGTTGGTAGATCTATACATGGCAAGGAGTTGGTCTTTTTCTTTATTTTCACCA
TTTCCATTCACTTTGTCTACCTTTTTCTCTCTCTAAATGATTTTCTGCGAGGCAATACCACATCCGACCACCAC
TAAAACATGCTCAAATTCACGACAAAACCCCATTTCTCGATTCTCCCATAGTTGCTATAGAGTTTTAGGACCTT
TATTATGCCTTTGAGTTAGCATTTCTAACGGGTCCATAGCGTTCTTATATGTTGTTCTCGTTTATTTCCACCAA
AATCCAATCATCAGGATTTTACAAGGTTAGATACTTTTTTTCAACTTGAAGATTTTTCTAATTATAGCAAACCT
AAGTAGGATAGAATCTTGGTCTGTACTATTCATAGTGGAGATATCTCTGAAGATCAGTTAGTAAAAGGGGCTAG
GATACACCATACACCTTACGAGGGGTGCAACTTCTCATGCATGTTCAGATACGGACACGACACTTCAAATATTC
ATAGTGTATGCAGAGGCATGATAATACATTGAAAATTATTCAAAATAAATTAAAATTCATTCGAGTTTCAAAAA
CGGCATTCGAGAGCTGCTGGAGGTGGTCGGAAACTGTTGGAATTAGAACTGGGCAGCGATTGTGCGTGGTTACA
TGTGCTATGTTTACATGGATATTGGCGTGAAATGGAGCAAGGAAGAGGGATGCGTGACTCACACAATGTCTTCG
AAACCCATGAAAACGGATATAAATGAAAGCTTGGTTTAAGTGGAGATGTGTTGGCTACTTTGATCGGGAAAGGG
GAGTTGGGATTGGTGGTCGCAACCGTGCTTTGATTTTTCATTTAGTTGAGGAAGATCAGGTGCTGTGGCTACTC
TTTTGGCACGGTGCTGCTGTGTTTTTTATTCTTTTTTCGAAGATGGCTATGTGAATGGGCTGATTGTTGCAATA
GCAGGTTGTTTGGTTGGCTGGTGAATGATTGGCGAGGATGGTTGTTAAATTTTAGTCATGATTTTTTTAAAATT
GTTTTTTATTTAAAAATATATTAAAATAATTTTTTTATTTAAAATTTATTAAAATAATATTACAACGGATATTA
TTTCTCCAGTACTTATTTATATATCTTTCACTATATTATTTGATTCTCTATAATTCTTACTTATCATTTCTTTT
TATAATATTTTTTATTTTTTATTTTTCAATCTCATTATTTAATATGATATTTTATTTCATTTTATCGGTTAAGT
ATTACGTTGATAATAAATTAATTTTTATATTTTTTTATCGAATGATAAAAGTTCCCCCCACCCCTCCTTTATTT
ATGTTTTGGCTTTTTTATCAAATTTTATTTTTTAATATGAAGATTTTAATTCCTTTAAGTTTCTTTATTTTTTT
TTTAATTGTATCCCTTAATATGAGCTTTTTATTTAATTTTATCATTTAATATTGTATTGATTTTTTTTTCTGAA
CTTACTCAATGAATAAGGTCATGTCAAGATAATTTTCACATAATTTAATTTAAGAATCGGGTTTAAATAAATAC
ACGGGTTGGGATTTTTTAAATTTAAATAGTTGTAACAAGTTTTATGATAATATCAAAAAAAAAATTTCAACAAT
TTAGATGTTATTTTTTTATATTCAAAATTTTTTTTAAAGCAACACGCTCCGATAACACGGTAAAACATCATTGA
ATTGAATTAATAAAAGTGATGGAATATCTAATTTTGAATTATAATTCAGAATAAAACATGCCATGAGCTGTGTC
AGATAATCCTCAGCCAACTAGCCTGAGCATGCTCTCTAACATAAAGTCCTCAACCCCCAGAACTCTGTCTTTAT
CAAAATAAATAATTTGCCTGTATTGTGCAAGTTGAACACTTATCCACATCCTTGATTTAGACTACGCAAAAAAA
GTAAAATTATTTCCCCTCATTAGAACAATAATTTATTCTCATCTTGTAGCCTCCAAATAATAGCAAAAATTAGC
CAGAGTACTGATTAGACATGCTAATTTTGGTTGAATTAATCCCTTCAGACTTTTCTCAATATATAGCAATCCAT
GGTTGTTCATGTTAATTCTAGCGTGCTCGTTGGCTTTTTTTCAGATTACACCAAGTTTACATCTCTTTTTAGCT
AGCTACCCAACTACTATAAATATATGAATGTAAACACATGCATGCTGTAGTATCAAACATACCAAGAGTTATCA
AAACATGGCAATGCTCTTGCAAGCAAGAAGAATATTGACACAAACCCTGCCGAGATGCAACTCAAACTCATCTC
AAGCCTTCGTTAAGTTACTAGGATCGGCGTCTCGGGGCTTGCACGATAATGTGCCGGGAAGTAAGTTGTTCGAT
CCGAATGCGACGTCAGGGAAAGTCATCACTTGCA
Sequence ID: 23
Sequence Length: 3025
Sequence Type: DNA
Organism: Poplar sp.
TAACATACTTTATTTAATAAAAAAATTTCTTTTATAGAATTCACTTATCTTAATGTTAATTTGCATAAAT
ATAGAGTCTTTGTGTATATATTTTATCTAGGTCCAACATCAATATTTACTTAAACATTCCTTTTTTTTTA
GTTTCTAATTATTTTTAAAGTTATTAATACGAGTTAATTCACCCAACTTAAGTCTTAAGCCACGTCATGG
ACCAACGAGGTATTGTAACTATCGTTTTACCTATCTCTAGTTGGCCATCTCGTGCCTCTATTGATGGTGT
ACAAGTCCCCCTTCTGTTCACATTTAATGCTAACTACTATCAAAATGTCGCGTATATATATATCATGTGC
ATGCAGAAACAAACTAGCTATAAATATATATATAGTTTCCTCACAGGGAGACAGGCCCCTTGCTTCATAA
ATATTGGCTTCCAATCATGATCTAATTCTAAATCAAAACTGTCTGAATGCAGACGCCAGGCCAATTCAAC
TTTGTTGACCCACTGACCATGTGTCAATATTTAATTTTCCCATTGTTTCAGGGAAAGAATGGAAAGCAAC
ATCTTCTTTCTTCGACTACATTAATTTCCCCCCTCTTATTTAACCCCTTTTCCTTCTATTATTTTTGTAT
TTTCTGTTATATTAAGCATGGTTTAAACTTGATTCAGTATTAACTTGGGATAAGACCTGCGTCAGAGATT
CAACTCAATTTTTTTAAAAAAATTATATATTATTTTGATTTTAAAAAAAAATTATTAATGGATTTTCAAC
CTTATTTTATCTGGAGCGTCCGAATCCCAGGTTAATTCTGATTTTTAATTAGATTAAGTCATGTTAACTT
ATTTTTTTATATTTTTTTTTAAATCCAAACCAGTTTAGGTTCTAGATCAAAAAATCAAGTCATTACAGGT
TTAAAACTATAATATTAAGATCATGTGAATTTTTTTCTCTTAAGATCTTGTGAATTTTTTTTCTCTTAAA
ATTTTCAAGGGTTGCATGCCTGGATTCATTTTCAATGATATTAGTTCATTCATTCATATATATATATATA
TATGATTAGGTTCATAGTCAGAGATGTGCTCCTTCGTTTAACAAATAAAATTCCGAACTATAAGGAATAG
TTTTTTATATAAATTTTTTAATTTTTCTTAATTTGAGTAGACCAAAAATATAGATTCACATCATGTTTGT
TATTTCCATAGCTTTTTCACAAAGAGTAATATATTTCTAGCTATCTGCAAATTTTCTCTTCGACAAAACA
TCTAATACTATTTGAGTTTTTTTTTCCATTGCAATCCAAACTCACACCTCTAAAATTAATCCAAAAATGC
AATTTAACTCTATCTTTCTGTCTATCTATATGTATTTTTTTTTATGAGTTTTCACATTCCGGATTAAGCC
AATCTCTTCAATTTAATTAAAAAAAATCTATGTACTTCAAAATTACAAAATTCATAAAAACTTTACTTCT
CACGTCCTATATTAAAAGGATGTTTGGTTTAGAGATGTGGTGATTTTTTTTAAATATATAACTCTTTTAA
AGCACAAACTACATCTTCAAAAACTAAAAATATATATTTTTTGTGTGGATCCCAAAATAAATACTAGAAT
CACCTTCAAATTAAACACCCTCTAAGATTTGAACTTCGTGATTCCCCCGGCTTAACCATGATCTCTTTAT
CTTTATATTTATATATATAAACTTGTCAAAGTCATAGCAAATTAATCATTCAAGCAAGATAAATATTGCT
ACTAATAAATTCAAACATTAATAGAGGGGATGGATTTTTTTTTGTTTAATGTGGGAGCTTTTGTAAGAGA
ATTAAAAGAGGGACTAACAATAAAAATGACAAATGACAAATGAGCAAACATTAAACTAGAATCATTTTCT
ATTCGCTATCGATGAGCGAGGTTTGATCGAGGTTGCTGCAAATCTTTCGAAGATTATGACTTTTTCAAGG
CTGTTATGGGCTGGTAGGCGCCCTAAATTGAACAGCTTCCAGTTTACTTATATTTATCCCATTAATAAAC
AAAGACTTCGCTTCCATATATATTTCATGACTCTGATCAGCTCAGTCATTATATTTTAATGGTGTGAGAG
CTTCATTATTGGTGGAGCATAAACCATCAACGCATAAGAAACCTTGCTTACTCATGAATCGGTGAAATGC
GGCATTAGGAGTAAATTAATAACGTTAGAATTTCCGGTTTTTTGTTTATTCAACAAGAGGTCTAATGGAT
TTGAATTACATATTTAATAAGGATAGAATTTCTAAGTTTGAATCATAATTCCAAAATAAGAGTGCCCCAA
CAAGGATAAAGATATCTTGTCCATAATTCAGAGTAAAGGAAGCATCCAAATTTAGCCAGCATCCATGTTT
TTTAACCTAAGCTGTCTCTTTTTGAAGAGATTTTTACCTTTGATTGACTATATATATACACACATTTATA
TATGCAAGTCAGATGTTCTAGTCCTCAACCCAAATTTCAGTATTCTTTTTTTCTCAAAATATATAATTTT
CCCGCATTTCTCAAGTTGAAACTCTTGTCCTCATCCTCGATTTAGACTACGCAAAAAAAAAAGTAAAAGC
ATTGCCCCTCATTAGAACAATAATTTATCCTCGGCCAGAGTGCTGACTAGACACGCTAATTTTGGTTGAA
TTACTCGCTTCAGACTTTTCTCAATAGTAATCCATGGTTGTTCAAGTCAATTCTAGCGTGCTCGTTTACT
TTTTTTAAGATCATACGACGTTTACATCTCTTTTTAGCTAGCTACCCAAATACTATAAATATATGCATGT
AAACACATGCATGCTGTAGTATCAAACATACCAAGAGTTATCAAAACATGGCAATGCTTTTGCAAGCAAG
AAGAATATTGACACAAACCCTGCCTAGAGGCAACTCAAACTCATCTCAAGCCTTCGTTAAGTTACTAGGA
TCAGCAACGCGGGGCTTGCACGATAATGTCCCGAGAAGTAAGTTGTTCGATCCGAATGCGACGTCAGGGA
AAGTCATCACTTGCA
Sequence ID: 24
Sequence Length: 3161
Sequence Type: DNA
Organism: Poplar sp.
AATACTGGGTTAAGTTGGGCATGGCCCTGTTTCCTAAATTTTTAAAACAGGGCATTATGTATTGGTCCAA
AAATACATCCTCCTTCCTTTCTTTTTCTTTTTTTCTATTTTTTCCTTCTCTTTTCTTCAGGTTGTTTTTT
CTCCTAAACACTCTTCTTCTTCTTCTTTTTTTCACTCTGGCACTATCACGGCGATTCCATACATAAATAT
ACTGGGATCTAAAACAGGTGACCTGGATCGTAAAACGTAGGGGTTTTCGACTAATCTAGCAACTTTGTTT
CAGTATTATTTAAAGATACATGATTCAATCTTGTTGACACTATATAATTTATTAACAGCAGCTGCTTTTA
TGATGAAAGTGCTTTTTATTTAAAATAATGTTTTTTTTTATTTTTAAAAATTATTTTTAATATCAACGCA
TCAAAATTATATAAAAACACCAAAAATATATTAATTTAAAATAAAAAAAAATAAAATTTTTTCGAAAAAA
AATTTAAAATGCAAAATCAAACAAGATCAAAATAATGATACAGCAGATTTGAGAAGGGGCATCTGCTTAA
AGAAAGAAAAAAGAACCATGCATTTGACTATAGTCTAGATAGAAATCATGCCAATACACCAATGGTTTCA
GCTTGTACTAATGATAATCAGAGGGCAAGACTAAATGCAATTATACATGTTCTTTATAGAAAATACATTT
AAATAAATAATAATTAAAAGAAAAAAAATTAAATCTGACATAAAATAAATTGAACTAAAATATTAAGGGA
TATAATTGAAAAAATAATTCAATTAATAAAATAATAAAAAATATTGAGCGATGTAATTGAGATGATAATT
TAATCAAGATAATAATTAAAAAAAACTTAACAATAAAAAGAATGAGAACTAAATTTGAAAGATAAAAAAA
AAAATCAAATGAAAGTTAAATTAAAAAAAAAATTCAACTCTATGAATTATTTAAAATAAAAAATAGCAAT
AAAAAGAATATAAATCAAATATGAAAGAAAAAAAATCAAGGGACGACTATGAAAATGGATAGGGAAAGGC
TTTGAAACCGAAGGAGAGAAAAAAAAAGAAAAGAAAAAAAAAGTCATTGGAGCAGAACCTGATATTTTTT
TTGTACAAGCGCCGCTCATTAATGGAGGAGACACTATAAGGAATAAAACGCTATTGTAGAAGTTGTATTT
TGACCTTTGAAGGATGCTTCATGCATCAGACAAAGATCGTAGAAGTATTCATGCACTTTCAGGTGAACGT
GACGCACAACTCATTTTTAGAATTAATTAATATGTTATATACATGTCTAAATAATAAACCATCAATAATC
AAACTTGATAATAACAAAAAAAAATCAAATGGAAAAGATATTAAAACCTCTTGACCCAAAACGAAGACAA
GTTTAATCCAAGAACATTTCGGTAATTGTATTGTGTATTTGTAATGGAAAAACAATAACACCCTTGCTCG
CGAACTTACCTTTTCTTTTGCCTCTAAGTGTATATAAGATATTTTATTGTGCACAAAACAATAAAAAAAC
CTCTTTACCCTTTCTCTCAAGGCCAATTGTGTTACATTTACAGATGAAAAACCGTAATTTTATTGTTCCA
ATCCATAATGACTTTGGTTTCTTTTAATGTCATACAGCAGGCCCAAAGGCCTAGTAAATGCTTTCACATA
CAAAGAAGAAACTACATGTCACTAGGTGGGGCACTGCCCCCTATCCCGCACCCTCAATATAACTGTATAT
TTTGATCTAGTGGCCAATTTAAACCTAAGCCTAGCTTGAGCTCGACTGAGAGATTTATTGATGTTTCATT
TAGGTAACGACACTCTAATAATGGTTCAAGCAAGCCAAACAACCATTCAAGCGTTGAATAGCTCATTCTA
GAGATGGTTTTGAAAGAGTCAAGATGAAAAGAACCTTATTCCAACTCATTAAGTTGATTTGTGAGTTCAT
GGTTTTCAACTCAGTATCTAATTTTTATAGTTGAGTTCTCTCCAGTTTCTTGAATGTCAAGATTTGAGAG
CATTTAAAGTGAACTAATGATTTCTTGAGAAGAGAGAAAATAATAAATAATTTGTAAAAAAATTCCATGG
GAATTGGAATTACGAGAATTAGAGACAAATGAAAGGGGAGTTGACGCAGGGAAAAAAAAGAGAATACGAA
GGAGAAGCTTAAAGACAAGATAAGAAAGCAAAGCAATATAAGTTTTTGATGTTCATCACATTATTTCTGA
AGAAAGCAAAGCAAAGCAATATTATAGGTTTTTTAGTCATTAACTCTGATCCATTACATGAAAGATAGTT
AAAATAAGATTTAACCTTGAATTAAATGAGTTTATTCTAATTGGTCTAAAAGAAAATTTACGGTATTGTT
TAGTTGTTTATATGAAATAATAAATACAAGGTTAAATTGATCATTTTAATTTAAAACTTTTGATTGATGA
AGAATATTTTCTATAATTCTTAGAATAATAAAAGCAAAGTGTAAAATTAAATAAATTATAGGATAATTAG
GATAATTTTCTTTTTAAAAAATATTTTTACATAAAATATTTATATTGTGCTATAAATCACAAACTTACTT
TTGCTTAAAATTTTATAAAAGAAAAAGAATCACAAGCATCATAACTTTTTTTTTTGTTACTATTAATATA
TATATATATATATATATACATTTAGTTTATTACTATTAATATTGGTTTGTCAGGTTATGTGATTGAACGT
GTCAAATTAATGAGGTAAAATCGTGGCTGAGTCCAGTTCGATTGCTATGCCGTGGTCCCAGAACAACATT
GGCCTCAGATTCTTAAATTGGGTGGGGATCCACTAGTGACTGTGAGGAGGCCACGTAACCCACTCTTGAC
CGTGTGAAGACAATCGAAGCCACGTGATCCAATCAGCCTTTTCATTAGATATAGATGACGTGGAAGCAAA
ATGCCCGCTCCTCTCTTGCCCCATCGGCTATATAACAGCCTACCAAACCACCGTCAGATTCATTAAATAT
TCATCATTACAAAGCAAAAAGCTCCAGCTTCAACTCACTGGTAGTGATATTTCTTACTGAACGCTGCCTC
TAGCATTCGAATAGCTTTCACAGTTTAGATATTGATTAAGTTTCTTAATCACAGATCGAGTGATAAACAT
TGTTCTAAGTG
Sequence ID: 25
Sequence Length: 3000
Sequence Type: DNA
Organism: Poplar sp.
CTTTCTAATAAATTAAGCAATTCTTGTCGGTGCATGATGCCACCTCAGTCATGTCCTATCCAACGGCGAT
GCAAACTTCGCTGTCCCGCACTTTTTCATAGGACGAGGTGAAGTTTAGCTATATATCTTTTTTTTTTTTA
ATTTAAATTGTTAATTCTTTATATTTTTATATTCTTTTAATTTTATATTTTTATATTATTTTGATATATT
ACATCAAGAATAAATTTTAAAAAAATAATTTTTAAAATTTACTTAACCACGCAATACATAAAAAATAATA
GAACCCACCAACCTAAGAATACTTGTCAATGCATAGAAGTACACCTGCTAGTTCTTAAAACCAACAAAAG
GAAGCAAAGTAGATCTCTGAGTCAAAAACCAGAGGAAACCATAGAAACACATAATAATAATAATAATAAT
AATAATAATAAAATTAATTTAACTTGGTGTAATAATAAAATTAATTTAATTACAAAGAGTGTAACTCAAC
TAGTCATGTTCTAAATTTATTCTCTAGAGATTACTAGTTTGAGTTTTACAAATTTTAAGGCCACTGAAGA
TTTATATAGTCATTAATTTCAGAATATATAAGATTAGTTGAGTTACGTATAAATTGATTAAAAAATCATA
TTAATAAAAATAAAAAAATTAATTTAAAGGTTTAAGAAATCAAATTAAGAGAAAAGAGTGGTGTTTTATT
TTTCATCGTGCCCTCTCTCAACAGACAAGTAGAATGATGAGAGAGAGAGGGTAAAGAAATGGATTTATGA
GAACATTGACCACAGGGAAAGAGAGAAGCGGTTTTGTGAAAGGAACAATGAAACCACAGGAAGGTAAAGC
GGTAATGATATATTTCACGAATACTAAAACTAGAACAACAAGTTTTTTAATCAAATTAAACCACGAGTGC
AAGGCCGTCTTCTCTGTGTATAAAAGGGTCCTTCTTCTTTCTCATTTCCCATTCTCATCTGCAAACTTCT
CCTTTGCAATCTTTCTTTCTTGCGTTCTGTGTGTTCGTTGTGATTTGTGTTCATTCTTCTTGTCTATTAG
CTTGTCCCCCCGTCCGACTGCTTTCTGTATTTATTCTGGCATTAAGCTTAAGGTAAAGATCCCTCAACTA
TCCCAAGCAATTTATTCTGTTTTTATGTGATCTTGAGGGATCTTCCTCTTGGATGCGCTTTTTATTTTTT
CTTCCTCCTTCTTCCTGCTCCTTCTTACCTTGTATCTGATCCCCCAGACGAAAATGTTTTTTGTTTTTTT
AATTAGCTCAACAAATCAAAAACATTCAGCGCGAAAGAAATCTGATACAGTTTTAATCTGTTGTATTTTA
AAAATCATTACAGTTCATGCATGCTGATACTTTACCATGTCATGAAATTAAATCCCAGCATCCTTTTCCA
TAGCCAAAGAAGGATCAGCAGCATGCTGATAGTTTACCATGTCATGAAATTAAATCCCAGCATCCTTTTC
GCTTGCTTATACAAGGTCTTCGCTTGCTTATCAAGGCCACTGAAACATCATCATCGTCATAACTATGATA
GAACCCGCCTACTGCCGGCATTGAAAACATCATCACTAGTGTCTCTACATTAAAAAACACCCACTGTCTA
ATTTCCTATTTTTTTACTCTTAAAATGTCTTTCGGCTTGAGCTCCTCGGGCTCCACGGATGGCAACTGCT
GTATTATATATATATATATATATATTTCCCTGTTGGCTACATAGACCTGTTAATACCGTATAAATAGATA
ATATTAATATATAGAATTCATGTATCTTTCCGAGATTAAGCGATGCCGTATAAATAATATTAATATCTTT
GAATCAGTATGTATATTAATTAAAATTAATTTTTTTCAAAGTAATTTTAAGAGCGCATTTTCAACATCCA
TTTAGTTTTTTTTTAATAATAAATCTCTCTTTGCATTAATCCTAACGTTTGAACTTAGTAAATTAAAAAA
AGGAAAATACCTTTTTCACCAATATAGAATCAATGAACAGCACTAGTTTGCTTGAAATAAAAATAAAAAT
AAAATCTAATAAGACATTTCGAAATCATCCTTATCCGCAAATCACTACATTAGTATAGTATCTTGAAAGA
TAAGCAAGGATCATGCAAGTTTATAATAATTAAACTTAAAACGTACTATGACGTGTGCATCATTCATTCA
TTCTGCATGAAACTCTCCACAAAGTCTAGCCTTTGCATCATTCATTCTACTTCATTTTATTTTTTCCTCT
AATGGTTTCGATTGATTTTTCTTTCTTAGAGTCTGGTCTTTTAGTTCAACTTTACATGTTTTAGGCTCGT
ATTTTGAGAGAAAATAAAGAAAAAAGTATGCAGATCATGATTCTGCAAAATACTGAACTAGTGTTCTGAT
GAATTAACATGTAGCATATATAATGCTGGAAGAACTAAAGAGCAGTTGGGCTGCCATGACCAAAAGAAAC
TTCGACTGATTATAAATGTGAAAACTTGGGCCCATTCTTTGGTTTCTGTCTGTTGTTTTATGCCATGGCA
AAACTCTGCTTATTTTTCAACGTCCAACGTCAAATGGGAGAGGTTTAAATTCTATTGTTATGTCTAAACC
ACGTGGTTGTTATCTATATCTGACCGAACATTCAAGCTTTTGGTATTCCACAAGAAGGGTTTTCTTTCTT
CTTTCTTTTCATAATTGTAATGTGTTTAATTTGTTTCTCGCCCAATAATCTTCTCTGCTTCAAACTAACT
TTAATTGTTCGATCTCTTGCGTTATTTTAGACATGTCAATCACCTTTCACTGTTGAAAAAATGGTTGGTG
AGGTTAGGTGGTAGGTTTTGAAGTCTTCTAGAATAATGTGGTTTCTCTGTTGCTCTTGACTTCTTCTTGT
AGATCATTACTGGCTGGCTAAGCTATCCATACCCCCCCGCCCCTACAAATAATATTGAGTTGTTGCTGGT
CTTAATTCCTATTATCTGTTATTACTCCCACTGATTGCTTTCTGTTTCTCTTAAGGAGCT
Sequence ID: 26
Sequence Length: 3109
Sequence Type: DNA
Organism: Poplar sp.
AACTGAGACAAATATCACAAATTAACTTATTAACATATAATTGGTTTTGTGATATTTTTTCATGTTTCGA
GTTTTTGATTCATTATAATCAACAGTCCAAGTTTAATTGCTAATATGTTTAATTTTCAGATACATAATTA
TTTTTAAATTAAATTCTTTTATTCGAACTTGATTTTTAACTTTTTTATGTTTGTTATCTTCTCACTTGTT
GGTTTCTGAATAATATATTCACGGGATTCACAGCACCAACAAACCTTCCACTTTTCACTTCTCGGGAAGA
GGAATGAGAGGGAGAAATAACTAGCTCTCAAGCTATCCTTTCAATTTGGAAAGACAACCTCAGCCGGAAC
CCGAGAAGGCACTGGATAACCAAGAGAGCGAGTCACTAGATGTAAGAACCCAATATAATTATCCGTACGC
TGACACATTCAAAATGATGAAGATGCGTTTTGGGTATGTGAAGATTGGCTCGGAGAAACCTACCGCCACC
TTGGGGATAAGATTTGCTAAAAAATATCCCTATATGAATTTGAAAAGCATTATCACAGGTCAATTTGTCT
TTTGATATCTCTTCGTCCTTGAGAGGCTCAGAGTACCTCAAATCAATCCAGAAATTTTATTTTTTTTCTT
TCTAGTCCTTTCTTTTTAGTCTTCGTTATAAATTCAATTTAATCCCTTGCATCTTTGAAATTATTACACC
CCACAGCATAAATACGAAGATACCTTCACCATTAAAAGAACAATCATAGCGCACATCGATTAACGTAAAT
TGAATAGGAAACGGGAAAGGAGCATCCAAAGTTCGACCAATAGTTGAGCAAAACTGGTTTGGCTTTGTTT
TTTGTTCGAATATAAACGAATAAAGATCGACCAACAGGGAGAAAAATGATGCTACAGAAAACACGCTGAA
GCATCATCTTGTCTGGTTAGGCAAAGGAATAAAAAAGAAAAAGGTAAAAGGATCATTTGTTCGTTGCAAA
TACTGTTTAGCTGATTGCCCTGAAATCCCATGACTGAGAACCTCCACCGGGACCGGTTTCACCTCGCCAT
ACATGCTCGCTGGAAACGGGTGCGGTGCCGGCTAGTCAAGGTGGAAGCCCACCTTTGGGCTAGACGTCTT
TGGGTTCTCTTCCGCCCCTGTGTGATGCAATGTTCGGTCAACATCCTCTGTCTTCAGAAAAAGTAATTTG
CTCTTTTATCAAAAGAAAAACGACAAATTCTAGTAACCAACAGTATGCAAAGAAACGCATTGCCAATTTT
TTCTTTTTCCCTATTAAATTAACTTCCCATTTAATTTTAGATGGTTTGATATTGTAATAATAATTGTTTT
TTAAAATATTTTTTTATTAAAAAATACATTAAAATAATATATTTTTTATTTTTTAAAATTTATTTTTAAT
ATTAACATATAAAAAATATTTTTTAAATATAAAGACAAACTGGATAAAGTTCAGTTGTTTCCAATGTAAC
TTTCTGGTCAAGGAGGTAGGACCAGAAGGAGTCATTCATTAGCATGGCATTCGATGGTTTTATCGCCAGC
ATGTTTTAGTTCGGTATTATCATCAAGTAACCATTGGAAGAATAAAAAAAATTGCTTTTATTTTATTTTT
TTCGAACTCAGCCATCTTTCTCGTGTCATCTTTGAAATAGTGATTCGATATTGATATTGTATTGGGATAA
AAACCATGAAGTTATTTAGAACAAACTAGATATGTTCCTCGTACATTGTCACGGACCACACAATTTTTTT
TAATGTAAAGAAAGTGGTAAATTAAAAAAATATTAATTTAACTATCTAGGCGGTGGCTCAGTGGTACGAA
CTTGGAATCAAGAGGTTTGCTCCCTCTGTGGTCTCAGGTTTGAGCCCTGTGGTTGCTCATATAATGGTAA
CTGAAGACTTACATGGTCGTTAACTTCATGGCCTGTGGGATTAGTCGAGGTGCGCGTAAATTGGTCCGGA
CATCCACGTTAAACTAAAAAAAGATATATATTAATTCTTAATTCATTGGTTAAATTGATAATTTAAATAT
TTACAAAAGAAAACCAACAACATTAAATAAACCTATAAAAAACATAAAAAATTAATATTAAAAAAGATAT
TTATATCATGGTAAAAAGATCATTCTATCCCAAAACTAAGATAAAAATTTAAAATATCAAGAGATAAAAA
AATCTTGATATTATTATAATGAATAGTATTTTGCATCCTAGAACACGATAAATATTCATAAGAGAATTAA
TGTTTTGGATGATGAATATATACTTTTAATTTTTATAATTTAAAAATATAAAAAGTTTATTTAAAAATTG
TGTTAATGAAATTTATTTTTATATCTTTAACTTTGTTATTATAAAAAAATATTTTAATTATTTTATATTT
ATTTTTTTATTCCATAACACATTTAGATTTTATTTTGAATGTGATCAAACTCATAATTTTTTAAATGAAT
GATATACAAACTATAAAAAATCAAAGTAAAACGTACCAATCCAATTATAGCATTCCAAGAACATCTCAAA
TCATTATCAAATTACAAAAAAACACATTAACTGGATAATACACACAAGTGGCGGGATATTTGGTGGAGTA
AGGCGTGTTTGGTGGGTTTCACCGGCAGTTTTGCCAAAATTTGATTTGTTTTTGTTTTAATTTTTTGTTT
TAATGTTTTTAATGTTTTTATATCAAAAATAAATTTTAAAAAAATAATAAAAAAATATTTTAATACATTT
TACAAATAAAAAAATAATTTAAAAAACAAACAATATAACTTTCCAAACAGCTCCTAATTCAGATGCCATT
TTTTTTTTTTTTTAAAAAAGGAAAACCGCCAGCGCCGAGGACTCAGTACCCTCGTCCCTTGTTTTGAGCA
TCTAACAGTGACAGTTTCCCAATAGCGATCGTTCAAAAATCAAACACGCAATTCTCATTTTCTCTTTCTC
AGCTATTTACTATAAATTGGCCTCCTCTTCCTCATCCAAAGTAAGTAAACACACACACACACACACACAC
ACTCTCTCTCTCTCTCTCTCTTCTCCAATCTACAACCAGTTTTTTAATTCCTGATCACCCAGACCATACT
AGACCATACAGCTTCTTCTTTGATCGATC
Sequence ID: 27
Sequence Length: 3000
Sequence Type: DNA
Organism: Poplar sp.
TTACAAACAATCTTTGCTACACGTATGTACATGTTTTAATTTAATGTCACAGTTTCCTGTCCTTGAACAC
TTTCCCTGGTCAATGCTTCACTTTCTATGATAAACTATGTCTCACTAATATGTGCGCGCTCTACTTGTTG
ATTTCTGCAGATATGCAAGATGCACGCGTTCTGTTTCCATTGGTTAGTCTCCCTCTACCTCTGCCCCTCT
CGCACACTCACCCATATGCACAACTTGTAGCGGACAAATAACCTCTTTTATTGTTTTTATGATATTGTAG
TGCCACCTGCATACTATGCACATCTTGCTGCATTCCGAGCTCGTTTCTACATGGAACCGGAGACATCAGA
CAGTGGATCGCTTACAAGTGGCATGGCTTCTGGACGAGGAGGTGGAGGAGCAGGTGGTCGAGCCACTCGC
GGACCTGCTGCCAATGCTGCTGTGAGGCCCCTGCCTGCCTTGAAGGAGAATGTCAAGCGGGTTATGTTCT
ACTGTTAGGATTCGAGACAGCCCTGCTTTTGGATTGTTGTTTAAATCTCTGGGAGGCCCCTGCTTACCCT
TACATGCAATATCAAGCTGGTTGTGTCAGCGTTGGGTGTATATTTAATTTACATGTTCAAAACTGCTGCT
TTTTTCGCTTTCTTCAAACTTTGTGTGACATTTGAATGTCTTGAATTCTAAGACTTTTAAGTTGCTGTCT
TTTTTAGATTTCATGGTTATGACCAGCGCAACTCAATGGCTTCCCTCTCGTCGGGTGCATTTGTACCCTG
GTTTTGTTTCTTCATTCGTTTTGGTCATGGTAGATGTCTTTTTACTATTTGTTCGACAGCTCAATGCAAG
CTTCTAGAGTCCCTTACTGTCTTTATATCAGTAATAATCACGTTACATCCTTGAATCAAACCAAAAAAAT
CCACTATCGTCGTGAACACGGGAGATTTGGACATGGTTCGGATAAGTCTTGAGTTTTGTCTGTTGTTTTT
GGAATATAAAAGGTATGTTTGTTTTTTTCGAGAAATTATTTTTTAAATTTTTTTTATATTTATTTGTTGT
TAGAAAAGTTAATCAACAAAAAATATTTTTCAATCGAAGAAAAATTCGGCTTACCTAAAAAATTTAAACG
GAAAATACTTGCTGAAAGAAAAAAATTTAAAAATATCATATTATTTGTTAATTATATCAAATTTAAAAAT
ATTATATTATTTGTTAATTATATCAAATTTGATAATCAAACTTTTGATTGCTATATATATTTTGTTTTGA
ATATTTATTTTTTAATTTTATTTTTTAAAATTTAATTTTTATATTAACTTTGTTTTTTTATTTTTATTTG
TTTTTTTCTTATTATTTTTTTATTGAAGTTTTTTATGTATCAAATTTGATCCTCATATTTTTTTGATTGT
TACTTATTTTATTTGAAATAACTTATAAAATGTTAATTATTATTATTATTATTATTTTAATTTCTTTATC
TTTTATCTTTTTTTATTTTTTAGATTTGATCTCTATTATTTTGATTATTATTTATTTTATTTGAGATAAT
TTATGAAATTATATTTTTTTTTCAATTTCATTCTCATTCAACTTTTTAATTTGTAAGATTTGTTCCTCAT
TATTTTAATAAACTTGAAAAAATAAAACATTAATAAATTATTTTCCAGCTCATTTTCCATTACATAACCA
AACACTGGAAAATATTTTTCAATTTATTTTTCATTACACTACCAAACATCAGAAAATAATTCACTTTCCA
TAAGGAAACTATTTTCTAGCAAACAAACGGGGTCTAAGGTTCTGTTTTGTTCTTGATTTTGAAAAATAAA
AATAAAATATTTATTAATTTTAAATTAATATTTTTTATTGTTTTTAGATATTTTAATACGGTAATATTAA
AAATAATTTTTAAAAAATATTATTTTAATATATTTTTAAATAAAAATATTTTCTCTCGTTCAGTTAGGCT
GCTTCAACCAAATAAATTGCCCGGGATCATAACTCTGATTTCTGATTGTCACTTCAAACAAACGTGAGAT
GAAAAATGATGGCACTGCTAGTCGGTGATATGAACGTCAGCTTTTGTCATATATATTGGTAATTTAGAAT
TCAGTTAGTCGGGTGTTCAGCTATCTAGTTTGGTTGCTCGAAAGTAACTTCAGGTTTAGATTCAGAACGC
TAAGAAGCGTCGGCAAGGGATTATAGGTAGGTCGAGGTCGAGGTCGAGGTCGAGTGGAAAATTTTGTTAA
CCAACCAAAAATATTGAACAATCTCCAGAAAATAAATTTATTTTAACCAATAGTGTATGGATAGAGAAAG
ATCTGAAGATAATATTAAAAAATATAAGAAAAAAGAATATAAGAAACATGGTTATAAAACTCAATCTAGG
TGTCGATCTAGCCTGCATCATGAGTTGAATAGGTTGACACGCGGGTCGGCGAGTGGATTAAAGTTAGGAT
TAAAAAAAAAAAACTCGCCTCGGCCAGACTAAACTCTAGATAGATAAACTACTTGGTTGACACGCCGGGT
TAGCCAGGCGGCTGCCATGGAAGGTAGAAGGATATGATACCATGCTGAAACATGGTGATCACAGTAGAGC
AAACTATTAAACTTTGTAGAGACACAAAGTCACGTGACAGCTTGTAACCTTCCTCTAGGAGGAAGAAGAA
GAAACCCATATAAGAGTCCTCTTCATGCATTTCGAAATCAAGAAAGATTAGCATGGCTATAACTCTTCCC
TTCACTTTTTAGATATTAAGCAAAAAGGAAATCTAAATATTCTTCTTCTATCATTCACACATTCCTTTCT
TTTCTTTAAGATTTCTTTCCAACAAAGAATGGTCTTTCTCCTTCTCTCCTAGCCAAAGTCTAGCTATCTC
CATCACCTCATTTTTTGAATATATAAGCACATTATATATCACACCTATTAAAACACACAGAAGCTTCATT
CTTCACAATCTTTCTGCATTTGAAACACCCTTTTCTGTTATCATTTGTTTTCCTGCTCAA
Sequence ID: 28
Sequence Length: 3000
Sequence Type: DNA
Organism: Poplar sp.
GACTTTCGGTATACAATGAGATCTCTGTCTTGAAATGGATATCAAAGAACTGCGCCATGATTTTGAGTAA
TTTGCCGACAGTAATTGAAGAAGACAGCTTGCTGTTATCCACCATCAACAAAATCGAGAATTTTGACAAG
CCTACAGAGCTCGTGTGCACTTCCGGTGGTGAGGCACGTGCTTTCTTAGAAGCCAGTGATCTGCAGAAAG
GGAAAAATGGTTCTGAGCTGATGTTTTCTGGCAAGACAAAAAGGGTCATAGAGAGGTGGAAACTAGCAGT
TCAATGGAGGATCAGCTATAAGAAAACCCTGATTGATTGTATTTCCTATTGTACTGTAACTATCAATTCT
CTCTCAAGTCAAAACATCTTGGCCATGAGAACTAAATAATACATGTAATTTTGGATACCAGAAAGATCAT
TTAACGCACTTGTTAACGTTCTCTCCTTCATTCATCTTGTTTTAGCCACCACAAGTAGTTTTCACCTGGG
AAGCATTTGCATGAGCCACCTTCATCTTTTCTGCTATCAGGTTTCTACCATTGTTGGCTGTAGAATATGA
TTCTTGTACTTTCATTCAAGTTACTAGATGTCGACTTATTCATCATCAGGTCAATTTAGGTTTTCTAATT
GAACATTCAAATTCTAACTTTAACCATATCATTGGTTAAGTCAAGCATCTTCCATGGTTAAGTCAAGTCA
TTTTCGATTTCTATGTAAATTTATAGCTGTTTTTTAAAATATTTTTTATGAACATTAAAATTATTCAAAA
TTATATAAAAAAATAATTCTTTTCTGAATTTCTTTTTTCTTTTAATGTTCATTCAGTTGGAAGATTTCTT
ATCAAACTGCAATCCAGAGCCATGTTTATCATATCAAGTATTCACCTTCAACTAACAGGGAAATTGATAT
TAAGTCGAGATTTTTTTATTTTCTTTTAATTTTAAATAAATCAGGACGATGGATCAGAATCCTGGCTTGG
TTCTCAAAAGAGAAAAATCGCTCAGTTTATTCAGCTTCGATCATTTGGGGAAATAATCATCATCTCCATC
GCTTCAATTCCATTAATGTTTCTCCAAACTCTTATCATTTAACACTATCAAAAGTAAAATTTTTTTATTT
TTTTAATTTCAAATAAATCAGGACGATGGATCAGAATCCTGGCTTGGTTCTCAAAAGAGAAAAATCGCTC
AGTTTATTCAGCTTCGATCATTTGGGGAAATAATCATCATCTCCATCTCTTCAATTCCACTAATTTTTCT
CCAAACTATATCATTTAACATTATCAAAAGTAAAATTTTTTTATAAAAAAAATAAATAAAAAAAATTTAG
TTGAAGATGGATCAGAAATCTGGCTTGGATCTCTCGAAAGAGAAAAATCGCTCAGTTTGTTCACCTTCGA
TCATCTGGGGAAATAATCATCACCTCCATCTCCGCCTTACTAATTTTTTTTTAAAAAATCAAAATAAAAA
AAAATCATAAAACATCTCCAAATATGCATACAACAGAGGGCATAGTGTAAAAATCTAATGAACTCCTAAA
TGGGTTTTGCAGAAACGGAAAATAACATATAGCGTCAGCTCATACGCAACGCTTATGCTGTAAAAACCGC
TGGAAACCAGTAGATGAAGCATTGAAAAATAACTTAATTGACCTAAGAAAGAAAATATTCGAAGCCGAGC
AGGCAAATCAGAAGATAAGAAATTGGAAAGTCTACAGAGACGCTTATGGTTTAGAAGAATGAGGAATTGG
CTTGGGAAGAGGGGTTTATAAAGGTGAAGGAAGGGAGGGTTTGCTGCTGTTTCTAAAACCCTAGAGCAAG
TGGGCTTCTGCCACGTGTACTGACGTATAGGCAGAATAGAGTTCGATTTCGGGCTGTTTGGGCTGGACCG
TGCCCAAACCCAACAAATGAGTGGATCTTAGGAGAGTTTGGGTCGTTTCGAATTAGTCCCCAAACAACTC
AAATTATTAATTAGTTTTCCTTTTTTTTTTATGCATATAATTGTAATTCATCCTTTTCTAGAAAATATCA
AAATATTTTTTTTTATTTTATAAAAAAAAAGCAAAAAAAAAATAAAAAATATATATATATATATATATAT
ATATATATATATATATATATATATATATATATATATATATATGCTTGCAAAACCGAACCTTTTCTTTTCC
TCTCCGTTATCGTTTTGCTTTTGCTTTGTAGCAAAATCCAAAAAATACCAAACCCTATTTCTTTCCAACA
TAAGCAAAAAGCTAGTTTCGTGTGCATGCAATTGCCAAATATTAAGACTTGTGGTCCAATGTATCCATTT
TTTGTTCCCTACCACTAATTTTGGAATGAGTCAAGAGTTACCTAACTAGAAGGTCTCGAGCTTGAATATG
GATCCAAACCGGAAGTTAGCATGGTTAAGAAGCTACAACATCATTTTTCTAGCTTTCGAACAAGCAACAG
AAAAATAGAGAGACGTGTCCCTTGTTTCTTGTTGTTTTTGTGTCTTTTGTTTTGTTTGATGATAATAATC
ACGCATTTGAGAAATTTGAAGTTAATAAAGAAGTAAATTGTCATTTTTCTTGATCTGGTGAGAGATTTAA
TCTAAAAGAAAAACAAAGAGTTGAGGTGAAAGTGGCAGATTTGTGCTGGGGCCTTCACCTATTCTTTCCC
TAGTTCTTCCTTGCGAGCACGGAAAGGAAAGAATATTGAGCATTGCTTTGAGTGATAGCCTTTTTTAGTA
ACCAAGAATCTCTTCGAAGCTCTTAAAATTCCTTTCTTTTTCTTTTCCTCCTCTTGCACCCGCCTTTAAG
CATCCTTTACCCTGAGAACAAAATCTATCAGCCAATCACTTGATTACAACCAAAGCAAACCCATTTTCAT
GCACCAATCAAACACGTACCATCGCTCTATAAATTGGTTATTCTAAACAAGAGTTGATCAAAAACATTCT
GTGACCATTTTCTTACCTTCAAAACTCGTGTTGTGGTCAAAAAACAGAGCGTTACTACAA
Sequence ID: 29
Sequence Length: 3000
Sequence Type: DNA
Organism: Poplar sp.
GACTTTCGGTATACAATGAGATCTCTGTCTTGAAATGGATATCAAAGAACTGCGCCATGATTTTGAGTAA
TTTGCCGACAGTAATTGAAGAAGACAGCTTGCTGTTATCCACCATCAACAAAATCGAGAATTTTGACAAG
CCTACAGAGCTCGTGTGCACTTCCGGTGGTGAGGCACGTGCTTTCTTAGAAGCCAGTGATCTGCAGAAAG
GGAAAAATGGTTCTGAGCTGATGTTTTCTGGCAAGACAAAAAGGGTCATAGAGAGGTGGAAACTAGCAGT
TCAATGGAGGATCAGCTATAAGAAAACCCTGATTGATTGTATTTCCTATTGTACTGTAACTATCAATTCT
CTCTCAAGTCAAAACATCTTGGCCATGAGAACTAAATAATACATGTAATTTTGGATACCAGAAAGATCAT
TTAACGCACTTGTTAACGTTCTCTCCTTCATTCATCTTGTTTTAGCCACCACAAGTAGTTTTCACCTGGG
AAGCATTTGCATGAGCCACCTTCATCTTTTCTGCTATCAGGTTTCTACCATTGTTGGCTGTAGAATATGA
TTCTTGTACTTTCATTCAAGTTACTAGATGTCGACTTATTCATCATCAGGTCAATTTAGGTTTTCTAATT
GAACATTCAAATTCTAACTTTAACCATATCATTGGTTAAGTCAAGCATCTTCCATGGTTAAGTCAAGTCA
TTTTCGATTTCTATGTAAATTTATAGCTGTTTTTTAAAATATTTTTTATGAACATTAAAATTATTCAAAA
TTATATAAAAAAATAATTCTTTTCTGAATTTCTTTTTTCTTTTAATGTTCATTCAGTTGGAAGATTTCTT
ATCAAACTGCAATCCAGAGCCATGTTTATCATATCAAGTATTCACCTTCAACTAACAGGGAAATTGATAT
TAAGTCGAGATTTTTTTATTTTCTTTTAATTTTAAATAAATCAGGACGATGGATCAGAATCCTGGCTTGG
TTCTCAAAAGAGAAAAATCGCTCAGTTTATTCAGCTTCGATCATTTGGGGAAATAATCATCATCTCCATC
GCTTCAATTCCATTAATGTTTCTCCAAACTCTTATCATTTAACACTATCAAAAGTAAAATTTTTTTATTT
TTTTAATTTCAAATAAATCAGGACGATGGATCAGAATCCTGGCTTGGTTCTCAAAAGAGAAAAATCGCTC
AGTTTATTCAGCTTCGATCATTTGGGGAAATAATCATCATCTCCATCTCTTCAATTCCACTAATTTTTCT
CCAAACTATATCATTTAACATTATCAAAAGTAAAATTTTTTTATAAAAAAAATAAATAAAAAAAATTTAG
TTGAAGATGGATCAGAAATCTGGCTTGGATCTCTCGAAAGAGAAAAATCGCTCAGTTTGTTCACCTTCGA
TCATCTGGGGAAATAATCATCACCTCCATCTCCGCCTTACTAATTTTTTTTTAAAAAATCAAAATAAAAA
AAAATCATAAAACATCTCCAAATATGCATACAACAGAGGGCATAGTGTAAAAATCTAATGAACTCCTAAA
TGGGTTTTGCAGAAACGGAAAATAACATATAGCGTCAGCTCATACGCAACGCTTATGCTGTAAAAACCGC
TGGAAACCAGTAGATGAAGCATTGAAAAATAACTTAATTGACCTAAGAAAGAAAATATTCGAAGCCGAGC
AGGCAAATCAGAAGATAAGAAATTGGAAAGTCTACAGAGACGCTTATGGTTTAGAAGAATGAGGAATTGG
CTTGGGAAGAGGGGTTTATAAAGGTGAAGGAAGGGAGGGTTTGCTGCTGTTTCTAAAACCCTAGAGCAAG
TGGGCTTCTGCCACGTGTACTGACGTATAGGCAGAATAGAGTTCGATTTCGGGCTGTTTGGGCTGGACCG
TGCCCAAACCCAACAAATGAGTGGATCTTAGGAGAGTTTGGGTCGTTTCGAATTAGTCCCCAAACAACTC
AAATTATTAATTAGTTTTCCTTTTTTTTTTATGCATATAATTGTAATTCATCCTTTTCTAGAAAATATCA
AAATATTTTTTTTTATTTTATAAAAAAAAAGCAAAAAAAAAATAAAAAATATATATATATATATATATAT
ATATATATATATATATATATATATATATATATATATATATATGCTTGCAAAACCGAACCTTTTCTTTTCC
TCTCCGTTATCGTTTTGCTTTTGCTTTGTAGCAAAATCCAAAAAATACCAAACCCTATTTCTTTCCAACA
TAAGCAAAAAGCTAGTTTCGTGTGCATGCAATTGCCAAATATTAAGACTTGTGGTCCAATGTATCCATTT
TTTGTTCCCTACCACTAATTTTGGAATGAGTCAAGAGTTACCTAACTAGAAGGTCTCGAGCTTGAATATG
GATCCAAACCGGAAGTTAGCATGGTTAAGAAGCTACAACATCATTTTTCTAGCTTTCGAACAAGCAACAG
AAAAATAGAGAGACGTGTCCCTTGTTTCTTGTTGTTTTTGTGTCTTTTGTTTTGTTTGATGATAATAATC
ACGCATTTGAGAAATTTGAAGTTAATAAAGAAGTAAATTGTCATTTTTCTTGATCTGGTGAGAGATTTAA
TCTAAAAGAAAAACAAAGAGTTGAGGTGAAAGTGGCAGATTTGTGCTGGGGCCTTCACCTATTCTTTCCC
TAGTTCTTCCTTGCGAGCACGGAAAGGAAAGAATATTGAGCATTGCTTTGAGTGATAGCCTTTTTTAGTA
ACCAAGAATCTCTTCGAAGCTCTTAAAATTCCTTTCTTTTTCTTTTCCTCCTCTTGCACCCGCCTTTAAG
CATCCTTTACCCTGAGAACAAAATCTATCAGCCAATCACTTGATTACAACCAAAGCAAACCCATTTTCAT
GCACCAATCAAACACGTACCATCGCTCTATAAATTGGTTATTCTAAACAAGAGTTGATCAAAAACATTCT
GTGACCATTTTCTTACCTTCAAAACTCGTGTTGTGGTCAAAAAACAGAGCGTTACTACAA
Sequence ID: 30
Sequence Length: 3000
Sequence Type: DNA
Organism: Poplar sp.
TAGAAACTCACTTATCAAATGAATTGAGTTATTTTTTTTTAAAAACAAAATCTTTGTGGTCGCATTAGAT
TTTATAACCATGGAAACGAATGAATCTTTGGGGGAGGAGAATTTGTTTATTAGAATTTTGTTTAATTTTA
AAGTAAATTTTTAATTTTTAAATCCAGATAGTTAAATGCATAAATAAGTATTACATAGATAAATATTGGA
TATGAGTATTTTATTATTATTAACATAAAATCTAGAGATTATCCTGTAAAAACAATTTAATTTAAATTAA
TTTATTACCTAGCAAAAATATTCATTGTGATTAATAAAAAAAATTGATTATCTCCAGTAATGTATCTTAA
TCCTTGTATTTAACACAATAATTTAGATATTTAAATTAAATTTGAGTATAATTTAACGATGAGAAAAAAA
AAAAAAAACTTTATACTTCAAGTAATGTATTTCCGTCCATCATGCGCGGGAGCTGGAGAAGTTGAATTAA
TGATCTTGGCGACGAATTAAGCATGGCAAGTATTGGCAATGTTGCCGATGCAAAGAGTGCCAAAAGCAAT
ATTGAGAAGATCCTGATGGGCTTCAACCCCATTCAAACCCGAAGAAGTTGAGGATAGTTGGATATGGAGG
TTCAAAATTTCCAATTGGATGATGAACATGCACTTGATGCAACGAAATCTAATGGAGATCTTGCTGGAAT
GGAATGGTGTGGCAATTCTGAACAATTTCCACCATTTGGGAAACTAGAGTTCCTTAAGCATCTTTCTTGG
AAAGTCTGCATCTTGATTCCCTGAAGAGTTTAGAGCAATGGACACCAGTTACTGAAGACGGTTTTCCTAG
CCTTGGCGAAGTCTAATTGCTCTACATAGTCGAAATGCCACCAGTTATGATCTCCATCAGCACATTGAAA
ATCGTGGAAGGCAGTGCTACATTATTGAGGTCAGCTAGGAACTACACTTCTCTTATCTTCCTTGAAATTA
AAATGATTTCGGATTCGATGCTTCTTAATGATGACTGGTTGCCAAACCTTGCACTCCTTGAGCACTCACA
TGGTTTTGAAAAATCTGCAGTCCCAGTCATATCAGATGTTAGACAACCTATCTTCTCTTCGGAACTTGCA
CCTTTCAGTATTCTAATAAATCTGCATCTCTACCTGAGGAGTGCAATACCTGACAGCACTTGAGAAATTG
TATCTGGAAGCATGTCCAGAGCTGATTTCGTTGCCGAAGAGCATCCATTATCTCACTTCTCTCCATTATC
TTATTATTCTGGATTGCAGGGCCTTACGTTCTCTACCAAATGAGATTGGACATCTCACCTCCCTTTCACC
GTTGTTGATTTGGGACTGTCCTAAATCGATGTCTCTGCCAGAACAAGTACAGAATCCCAGTATGCTCAGA
GTTGAGAATAAAGGGGTGTCCATATCTGAAGAAGAGGAATAAGGAAGAGAGAGGAGAGGACTGGCCAAAG
ATAGCTCACATCCTTTCACTGATATCAACCTGCAGAAAGTAATCCAATGATCTCTGCAGACATGAAGATT
AGAGTGGTTGACTTTTTGGATTTCGGAATATGACGAGGTTCACTCCACATTAGTTACATTGGAAGTTCAT
GATGTAAGCCTTTATGCGATTCTACATGGGAAAAATGCTGCAATATGGTTGCCTTGTTCTACTTTTTATG
ATCTATACAGATGAGATGATACACTAGTTATAATTTGCAGAATCAACGATGATAAGTTGTAGTCCAGATT
TTTATAATCTATAGGGATTATCCATTTGATGTTTGCAATCTACCTCTGATTCTCTTTACTGCTGCATTGG
GTCAGAATTGGTGGATGTATCTTCCAAAAATATATTTCCATGTTTTCCAAAAATAATAATCTATATGGAT
TGGTTATTCCAGCACCCATAAGTCAGCAACCAGAGGGAGTTTTCCAGGAGGAATTGGACTGGAAGAAAGA
GGAACAATACTATAAGGAAGAAGAGAAGATAGGTCCAGAAACAAGAGGCATTCTATGCGGCAGAAACACC
ATATCTTTTTCAATTCATTTTTATTTTTATTTTTTACCCTTCCATGTTTCTCACAGCCCAGTCATTTTGA
TCTAGCTCTTTTAATGGTGACAATGCTTCATCCATAATCCATAATCAAAATTCATATGTTTATCTCTCCT
TTTTTTTTTTTTAAGAATTAATATACTTTTCTTATCAAATAACAAAAGCAGAAGAAAAAGGGAAAAACCA
ATATGCTTGCTAAAACCAAACCTTTTCATTTTATTTTATTTTTCTCTCAGTTACCATTGCTTTTGCTTAA
TTTATAGCAAAATCCCCACCAAAAAAAAAAAACAGACCAAGCCCCATTGTTTCCCAACATTATGTCCCAA
TAAATTATCACATGTTAATTGCAATTGGCAAATGATAAGACTTGTGTCTGATGCATCCATTATTCCTTGT
TCTAATTCTTTATATATTTTTTACATGTTTTTTTTTTTCATCCAAGATATTAACCAAGTATAAACTAAAA
ACTTTAATTGACCTGTAATCTTTTAAATATTAAAATTAAAAACAAAAACAAAGAAAGACCTTGGCTACCT
TTCCTTCCTTCCTTCTCTCGTCTTTCTTTTTCTATGAATTCTTCCCTGTTCCTATCTTAGGAACTCGAAA
AGAAAAGAATATTGAGGATTGCTTTGATTAGTCTCTTTTATAACCAAGAATCTCTATGTAACTCTTAAAA
TTCCCTTCTTTCCCTTCTCTTTTTCTTTACTAAGAATGTTCCTTTTCCTCTTCTATCACCTATCGTCCAT
CGACCTATTCCCTTTTAAAAAAAAAAGAGTAAGTCTCAAAGCCAATCATTTGATTACAACCGAAGCAAAC
CCATTTTCATGCACCTACCATTGCTCTATAAATTGGTTGTCTTAAAGAGGAGTTGATCAAAAAGCCTTTC
GTGATCATTTTCTTTCCTTCAAAACTTCGTGTTGCTACAAAAAATAAGTGTTGTTACAAA
Sequence ID: 31
Sequence Length: 3000
Sequence Type: DNA
Organism: Poplar sp.
GTTTGTGCTCAAGCCCACCGACAAGAGCTTATCCAAGATTTATATAAAACATGGCAGGATCCTGTACGAG
GGACAGTGTCTGGTGGCATGATCAAGTATGATTTACCTCTCCTCTTGTACTTCCTCTCTTTCTCTTCATG
CTTGTCTTTGGTGCATTAAAGTTGGGATTATTGTTAGTTGACCATTGAGTCAACAACTAATCTGTCTCTG
TTCCAAGAATAGTTTGTGGTTAGATGGTTTGAATGTATTTTTCTATAATGCAGGGAGCTTCTCATATCCT
TCCGTAGGGCAACCGGGCAGAAGCCACAGCGAATTATATTCTACAGGTATTATCCTGTTCTCCCTGTTTT
TTTTTTGTGTATTGCTGCCATGTCTAATGGTGTAATTATTTTCCAGAGATGGTGTCAGTGAAGGACAGTT
TTATCAAGTTTTGTTGTACGAGCTTGATGCTATTCGTAAGGTAAAGCTGCTTTTCCTCGAAGCTCTCTAG
GTTTTTTCTTTTCTATTTGGTCATTATCTTGTTGGATTTTGTAAGCCCTCTTAATTTCCCATTTCTCTGC
TTGTCAACCTCAGGCATGTGCTTCTTTAGAGCCCAATTACCAGCCTCCTGTGACATTTGTTGTGGTTCAG
AAGCGTCATCACACAAGGCTGTTTGCAAATGATCACCGTGACCGCAATGCTGTTGACAGGAGTGGGAATA
TATTGCCTGGTAATAAATCTGGCTTGGTGATAGAATTGTGTTCCAATTTGCTTTAGATTTGCGTGACATG
TTTCGCTAAACACTTCATATGGTAGGTACTGTTGTGGACTCGAAGATCTGCCATCCTACTGAATTCGACT
TCTATTTGTGTAGTCACGCTGGGATTCAGGTAAGACTCGCATTTCTGCGCAAGATTCACATTTCCTTGTG
TAAATCTGATTGCTGTAGAGCACTTGATGCTTTTGATTTCTCACCAATGGCCACCAACAACAGGGCACAA
GCCGTCCAGCTCATTACCATGTACTTTGGGATGAGAACAAGTTTACTGCTGATGGGCTGCAGTCCCTGAC
AAACAATCTTTGCTACACGTAAGTTTATGTCTTCTTTAATTTTACAGTATGATGTGTCTTGATAGTTTAT
TGATTTGTTTCCTTTCCTTACTTGTCATTCTATTTTTATTTTTATTTTTATTTTAGCTCTAATTTTGGTC
TTGCAACTCTTTTTTTTCCCTTCCAGATATGCACGATGCACGAGATCTGTTTCCATTGGTAAGGACCCCC
CCCCCTCCCCACACACACACACACAGCGCCCCCATGATTCACGTCAATACAATCATGGATTGTACTAGAC
TAATAACTTCCACTCTTGCTTGCTTTATGATGTTGCAGTGCCACCTGCATACTATGCTCATCTTGCTGCA
TTTCGAGCTCGTTTCTACATGGAGCCAGAGACATCAGACAGTGAATCAATTGCAAGTGGCATGGCTGGTG
GTCGTGGAGGTGCTGGTGGGGGTCCTCGTCCAACACGTGGACCTGGTGCTAATGCTGCTGTGAGGCCTTT
ACCTGCCTTGAAGGAGAATGTCAAGCGGGTTATGTTCTACTGCTAGGATCGTTGGAAATCCCCTACTTTT
GGATGGGCATTTAAATTTTACTAGTTGAAACTGTTCTGTTCGGAAAGCGGGGGAGGCCGCTCTGAAGCAG
AATATCAAGCTGGCTATGCTCTGCTTTTTGTGTCATCTGGCCAGTTGATATTTGCTTTTAAATTGCCACT
GATCCTACCGTGATCAGAAAGCTGCTTTTTGCTCATGCTGTGTGTATGGCATCGAATATCATTGAATCTT
AAAACTCTAAATCCTCTCGAAACTGGGATTTCATTTTTCATACATCTGATCATCTTCCTGCCACCTCTAT
TTGTCTCGGCATGGATCTGGAAATTGCAGTTTGGATTTAGTTCCAACAAGCCAAGGTTCCAAATTTAGTC
AAATGGTAATCATTAACAGACGAAAGATTAAAGATTTTGAGAAAGCTAGTTGGTGATAGGGAATGTGGGC
TGTCAGATACTTCTGGCCTTCCCAGTCACAACAGTTCATGGCGTCTGCTAAGCCAGTATTGTTGCCGAGA
AATAGCACGAGGACTCTTCATTATGCAGCTCGGGACTGGAAAATTGTATAGAAGCAGCAGAGAAGTCTCA
ATCCTTCAAGTAATTCGAAGTCGTTTATTTAAAAATTATTGTTGGTAAATGAATGATAATTGTAACGAGT
GATATAAAAACAATTTTAAAATTAAACTCAAATAGAAATTTTATCCTTCGATCGAAACAAGATTTAATCC
CGTTTTATAATCAGCTTTCGATTTAGCCCAAATCAAGATCTAGAAAATAATTCAAATCAATTTAGAAAAA
TCACATGAAGCATGATCCAAATCTACACTATCCAATGATGCTCTCTCATAGGCAAACATCCATGCGAAGG
AATAAAATAGTATCCAAAGAAAGAAGTAGCTTGCGGTCGTAGCAAAGAACATGAGAAATGAAAAAAATAA
TTTTTTAAAAATAAAAATAATATTATATTAATAAAATTTTAAATAAAAAATAGTTTGAAAAATAACTATT
ATTATTAATTTAAACAGTAACAAGATACTGAAACATGGAGATCACACACAGGTCACGTGAGAACTTGTAA
CCTTCCTTTGGGAAGGAGAAGAAAAGCATAAAATATACGAGTCCTCTCCAATCCATGCATTTTACTCACT
GTATCATTCTTCCCCTCCACTTTTAAGATATTAAGCAGAGAAGGCAATCTAAGCTTGCTTCCTCTGTCAA
TCACACATTCCTTTCTTTTCTTTAAGATTTCTTCTCCTCCTCCTCCCCTAGCCAAAGCCTTTTTATCTTT
CTTTTTTTTCTAAGCATTTCCAGCTCCCTATATAAGTACATTGTCGCACACCTTTTACAAACACACACAG
GTTGCTTTGTGTTTTTTGAAAAAAAACCCCTTTTCTGTTATCATTTGTTGTCCTGCTGAA
Sequence ID: 32
Sequence Length: 3083
Sequence Type: DNA
Organism: Poplar sp.
AAAAAAGGGATAAGCTCAAAACCCTATTACAAGCCCTTCCAGAAACAATTGCAAAGAGTTTGTAGCTGTA
GTCTTTAGCAAAGCAAAATCAAACAACAGTTTATCACCTCTTCCTTTTCTTATTTCCGGCAGCACTGCCT
TTCTTGGAGCCTCTAAAATCATCAGTGGTGTCAGCAGTGTTCTGCTTCTTTAAACCTTTCCTCCCTCCAA
ATCCAAATTTGGAATCCCTTGATTCCCTCTTGAATTTTTTCTTTTCTGGTCCGTTTTTCCCCTTCTTCCA
AGGTTGTCTCCCCTTCCCTCCAGACCGATCTCCTGGAGACACCCCTGGCCTCTTCTTGTTCGACCTTTCA
AACACTTTTCCATCTTCAAAGGGCATATCCAACTCACCATCCTTGTCGCCTCCAGCAAACCCACTTTGTT
TCCTCTGTTTCCTCCAGTTCTTAACAGTCTCTATCGCTGCCTTTTTCTGTGCATTTCTCTCTTTCTGCTT
CTGGGCCTGAACCTCTTTAGCTAGTTTCTTAGAGTCTCTAGCTTTCCTTCTCTCCTCAGCCTCCTCAATG
CTTCTCTTCTCTGCCAAAAGCCGGCCCTTCACTTTCTCCATATGAGTATCCGACTTTGCCATCTCAGCAT
AATAATCAGGAGGCCTGAGAAAAGGAATCCCCATCGACTCTAGCTTAGCATATGCCTGCCTTGTTCCCTC
TAAGGCTTGTGTGTAAAAAGCAAGCTCTCTGGTCAGGTCATCATTCACGTCCACCTCTTGCTCTTGATTG
AAGTCGATCACAAGTTTGTGGATCCATCCAACATTCTCTGGCCAACTAATGTCTTGAAGCTTGTCAGCAA
GACCATCTCTATTGAATATAGCATTTTTAGATGGTTCAGGCAACTTCACACCTTCATCCTCCGATTCTGA
CTCAGATCCAGACAATTTTTCATCAAGATTATCCATTTCATCATCTGTTATCAGCTCCTCATCAGACAGG
GTCAATTCTTCCTTGTTTACCACCATTATACAAACCTATCACAATCCAAAACCGAATTACAATTAATAAG
CACACCAATATCCACTCAAGCATGAAAATAGCAGATATTACTCATGGATATCAATACATAAACTCAAAAT
TAAGCTAAAAAAGGTACCAAAGAATAACATAGTGACAAGTTCTCCTCAATCAAATTGGATTCAGATACTT
CTACAAAGTAAATTGGCGCTGGTATACAACCCCGGATAAAGCAAACCACCAAAAAACACAAAACTCAGAT
TGGCTCAACAAATCAAGATTAGATAATCCAATTTAAATACTTAACCACCAAGAAAAACCCTTAATTTATG
CAATAAAATTCGCACTAAATTGATAACAAGACCATCAAACAAATACAGACAGAGCCTAAAATCAACAAAC
TCTAATGACCCAATTCAAAATTCTTCAAACCCAGATGCTATTTTAGCATAAAGTTTATTACTTCCAACAA
AAACAAGCTAAAACACTACTTAAAGCGAAAAATCGAAGATGCAGAAAACGGAGCCATTAACTATACAAAA
GCAAGCTGTTTCGATATAAGAAAAAAAAAGGTAGCGTGAAAGAAACTAAGCAGGTTAGGTTTAGAGAAAA
GGAGAAAAGAAACAATTTACCTTGTTAGAGAGTGAGGGAAGTTGAGATTCGTTGAGAAGAAGATTATATT
GTAGAAACTGCAACCTAATAGGGTAGCAAGAAGAAGCATGAGTAAAACCCTAAACCCTAATTTGACAGGG
CACACCTGGGCCTTAGCCCAAACCATGTACGATTTAATGGGCCCACGATGAGCCTTACATGTGGTCTTGA
AATTTTTTGTCACGAGGTGTTGTGTTGTTTTAGAAAGTAGTTGATATTAGGGTGATTAAATTAATTAAAC
TATCTATAATATTTATAATAACCGACTCGAAATTAATTAAAACTAAAAGGTTTATTAAATTTTCTATATA
ACTTTAATTATAAACTAAAAACTCATTAAATCAAAGTTCAATAAAAAAAAAATAACCCAACAAGATACTT
TTTAATTTAAATTAAATTTATTTGATTTTAACAAATTTAAAACCAAACTGAGATTAAAGTTTTTATTTAG
TTCAGTTTATTTTAATTTTTTTAAAAAAAATTAAATCTTTTGGTCCATCCCTACTTGATATTTTCATGCC
TTTTTCTAATTATAATCTTTCAATCCAAAATATTTTTTATGATAAATTCTATGGTATAAAGCTTTTATTT
AGCAATGAAATGCCGAGTTTAAGCACTTTTAACCCCAAAATTATTGATTTAAAGCTTTTTTTTTTCATGG
GATGGCTATTGGGGGATGTTAATTGTCGGCAGTAGGTTACATGTTTTTAATTATATTAATTGTATTTAGT
TGTGTTTTAAAAATATATTTATTTTAAAAAATATTAAATTGATATTTTTTTTAATATTTTTTTATAATTT
TAATATATTAATAAAAAAAAATTTTAAAAATATTTATTTCCAAGTCAAATCACCTTTAAAAATTATTAAG
CAACGTAATTCCAAACACGCTTACTGAGATATATTATCCCACCAAATTTATTTAAAAACTACGTCGTTTT
ACTTAAAAAAAATTTAAGACTATAAACACCCTTTCTTTTGCAGGACTTTTGTCGGCTGGAATGCCTTCCC
TTCCAAGTGGGCAGATAAAAAACAAGGGGCGGGCGCCGCGCCCATGATCGCATGGATATCATCATGCATT
ACTGGACCGCCCACAGTAATATCTTCAACTTTTTACCCTACGAATTTTCAAACAAAAAATTCCCCGCATA
TTCCCCATTGGATGCAAGACCCCTGCCGCCGATTGGGCCCACTCAACCATAAAGAGCCACGTCTCACGTG
ATGATCGAGAAACCAATCAAACCATCCACATCAGATCTTGCCTCAAATGTTCAACGGCTTTGATCTTACC
TCCCGTGGTTTTTTCCCCACGTTAGGACTCAATAAATAAAACCTACTTACGCCCTAGTTTCAGCATCTCT
GTGACTGTCTCAGGAAAAAGAACAGAAAAGAGAAACCTCAGGATCATCGAAGTGTTGGAACATCAGATCA
ACA
Sequence ID: 33
Sequence Length: 3109
Sequence Type: DNA
Organism: Poplar sp.
AATACAGACACCAAGGATACTTCTAAACTACAAAGGAAAAGGAAGGCAAAAGAGCTGATTTATGATGCTG
AGAACAACCCCTTGAACCCTTATTTATATTGAATTTTGACACTACAATTGAAGTCGAATTAATTAATTAT
CAAAATTAATTCTCACCATCTTTTAACCCTTAATTACCCACCACGAAACAAAATAAAAATATAACTATTT
AATCATCTAAATGGTGGTCCAATGATAAGAGCTTGGAACTAAGAGGTTTGCTTTCTCTGTGGTCTCAGGT
TCGAACCCTATGGTTGTTCATATGATGGCCACTGGAGACTTACATGGTCGTTAACTTCAGGGCCCGTGGG
ATTAGTCGAGGTGCATGCAAGCTGACCCGGACACCTATGTTAAACTAAAAAAAAATATGACTGTTTTACC
TTATAAATAAGATGTTTTCTTTTAAAAACAAATTGCTCACTTAGTGAAATGTTAATAATCAGGCATGTTA
GTTATGGATTGGTTAAAAGATAATATTTCTTCAATTTATTATCTAGGAAAAGAGTGGTAAAGGTAAGAAA
AATTGGAATCTAGGAAGTCAAAAGGTCGAAATGTCCCTTGCAATTTCTTCAATTTCCCTTTTATTTAAAT
TATTTTTCGCAGAAAGCAAGAGCCATCGTATTTCAGGCAGCAGAGGGAGCTCATCTCACCAAACTCTTCT
TGACGGTTACCAAACCCCGCCAACAGACAAACAAGAGAAGGTCAGGTATACTTACCCCTTCATGTTTAAA
ATGATGCTTTGATGCATAGAGTTTTTTTCGATTAGAGAATAATATAAATTATATTTTAAAATATCATTTA
ATAATTTAAACTATTAAATTAAAATAATTCTTTAACATGATATTAAAACCTTAATAACCAAACAGTCACG
AATTCAAATTTCAGTGCAAGTTTTAAACCCAAAGAGCTTTCACTTAAACGAGTATGTTAGAGAATAATAT
ATATCATATCCTGAAATCTCACCTAACACCTTAAATTATTGGGTTGAGATGATTTTTTGACAACCACGTG
TATAAAAAAATATGTTATAATTATATATCATATGTCAAATTTAAAAAAATGAAAATATAACACCATTAAT
TAAAAGAACTAAATAAAATAATTCTAATAAAAACTTACATTAAAGGTCAAAATTAGTTTCAATTAGGCAG
GAAGTACAACAAGACTAAAAATACTTAATAAAAACACCTACTCTAAATATAGCTTAATTATCGGCATGAA
AAAAGAAAAAAAAACTCTGATGTTTAACCAAAATTCAAGCTTGAAATGGGAAAAATTCAAATTGGATTGA
GACGTAATAAATTATAAATACAAGTATAATACTATTACCAACTCATTAATTTTTCATAAAATTACTTTGA
GACTTAAAAAATGAATAAAAACTTATCATGTAATTGTTTGTAAAATTGTCATTAATGTATAGAATAAAAG
AGAGACAAGTAGAGAAAGTTATTCAGCATTTAAAGTAAATAAATCATAAATCTAAACCTAGTGCTATATT
TTTTTTTCTTATTTTTTATATTTGAATTTGTCTGTATTTTATTAATATTATATTCATTATAAATAAAATT
AATTTTATTTTTTGTTAGGATTATTATCAAACCGAATTAAGGTAAATCCATATTTGATTTATTTAATAAA
TAGATTAGCGGATCTAGATCGTATAAGTTAAAAATCAAATCCATTTAATTATATCGTATAATTCGAATCA
AGATCTAGTCCATTGATAACCATAGTTGCCAATGGCAATAAAAGTTTTACCCATAAAAAAAGTGGGATAA
CTTTATTTATAATAAATATAATATTAATAATGAATATAATATTAATAAAATTATAATGACCTCTGTTTGA
AGGTAATATCCTAACAAACGTGTGACAACAAATTATTAATAATATGAATATAATATTATATTCATTATAC
ATATAATATTAATAATGAATATAAAATTATTTTTCGAGGGATATACTTTTCATTATTATTAATATGAATA
TAATATTCAATTGTTTGTTAGGATTAATATTTAAAAGTTTTCGAGGGATATACTTACTAAAATCCATGAC
CTCTGTTTGAAGCCTTGAAGGAGATCAACAATAATTGTTTTTAAATAGTTTTTAATTGATTTCAGTAAAC
TTTTGGTGATTCTATTTCTTTTCTTGTTAAATAGTTTTTTCCATCAGTAAAATATTTATTTTTTATAAAA
TATAATAGAGTAATTAAGATTTTAAGTTTTTATATAATTTTTATTGGAATTAATTAGAAAACAATATTTC
TATAAAATGGGATTGTGTCAAAATAAGAATTATAGGAAAGATACTTATTAAATACAAATTATACTAACAA
ATTAAGGGAAAATCTAGTCGATTAATAAAACTTGTATTAAATGGGAAGCAATATTAATAATTTATGGAGT
GAAAATAACATCACTCCAGTATAATAACACCATATAAGTGATAAAAAACAAAAACTCATCAACCCATAAA
ACATTTATTTAGGGCGATTCTATGATTTATTCATAGAAGCAATCATTATTAACCAAATCATTTTTTTTCT
TGACATCTCGATAACCTAACACCAAAAAAGCCAAAATAAACCATTAAATTCAATTTCACATTATTTCAAT
GTAAAAGAATTAAATAAAAAAAAACTATGGAGCACTGTTATGTTCCATAATGATTTTATGTCTTATACTT
TAGTAAAATCATGAGATATTTTAAATTTCTCTTAATAATAATAATTTTAAGTTTGAGATTCTCATTTGAA
AAAAGAATTATTTTTAAAGTGTAATTTGCTTTGCTTTGCTTTGAAAGAAGTATGGAAACCAAATAATTAA
AAAAGAAAAAGAAAAGGAAACGACGTGATTTCTTGTAGTAGAAAAGAAATAAACCAAATCGTGGTGTGTG
TTTGGTACTGAGGTTGAGTCTCGTGTGTGTACAAATACCTGTGTCTCTCTAGTGTTCACTATCTCCTCTC
AAGTCCTAAGTAGCTAAACACTTGTCTCTTGCGCCTCCCCCTCAAATCTCCCTCTCCCTCTCTCTTTGTC
CAGATCCAAAACCTTATTTAATCAAAGCT
Sequence ID: 34
Sequence Length: 3000
Sequence Type: DNA
Organism: Poplar sp.
ATTGGTTAGAGACTTTATTTGTTCTTTAATTCATGTTGCTTATCATATTAACCCTTTTTTTATTATTCTT
TGTTCTAGCTTGGTCAACAGGACTTAGAGAATGAATTTGATATGGATATTGGGCCAGAAATGAGTGTTGT
TTATGTTGCTAGCCCAAATCACTATAATATTTTAGTTGTTAGGATAAAAAACTCTCATCCTTCATCAAGT
TTGCCACATTAGTAACTTATTCATTGATCTATAACATTACCTCCACCAATCCTTAACAATATAAAGAGTA
ATTTGTGTACTTCTAGAGCTACTACTACTTTTGAGCCTTCAAGAGTAACTAGGTAATATGTTGATGACAT
AATAGGCAAGATAAGATCTTTCACTAAACCATTACATTCCTAACTTAGCTGGTGAAGTTGAGAAGATCTT
CCACTTTAACGAAAATATAAAGATTGATTGTTTCTCTATCAGAAGAATGGTGACAGAGGTGATTGAAGAT
GCTAAAAAGCTTAACCATTTAGACTCTTCACTATGTCCTGTGATAACATCATAGTAGCGAGCCTTAGAAA
TTGAAAAGCTTAAAGGGCAGTTCGAAAATTTCAAAGCTCTTAAAGATGATATCTCTATATCGTTTTCCAC
CACTCATGTTGGGATAAAAAAACACAGAGGAACAACTCATGAAGCTACAACACAAGGACCAAGTTAAAGT
CATCCCTCAAAGTGCATGAGGAAGAGCTTTTTAAGAGAAAAGTCACCTCTGGCATTAAAGTATATATCAC
CACAATTTCTACTTTCCTTGTACAAAGTGAAGCTGATGCAGTCATTTTTTAAAAAAATTAAGAGGACTAT
TGGAGACCAAACTAAGAGAGTTATATGTACATAACTAGAAACCATGATATGCTAATAGTTTCTCATATCT
TAGAAATTTTTTTTTCCTATCATTTCTTTTCCTTTGGAATGCTTTTTAGTTTTGGTAAAACAACCCCTTA
GGTCAAAAATCCCTCAACAAAAAAGTAACTAACCAAACAAAGTCTACGTACCTGACTCAAAACAAAATTA
ATCGGGTTGACTTGAAAACACTAGTTCAACCTTGAACTAAATCGAAAATCATGGTTTAACCCGAAACCTT
TGATTTGACCATAAACCAAACCAAAGACCACTGGTTTGACTCAAAAAATAAACCAAAACTTAAACCAGAA
ACCAAAACGAATCAAACTTGAAAAAAATACAAAAACTCAAAAATTATTTGTCAAAACGAATCAAAACCCA
TAAAAAATAAAGAATACGAAGAACACCAATGAACATTTAAACAAAACCCAAAAACACAAATTTCAATGGA
GGTGGTGTTGCCTTTTAATCATGTCAGAAAAAGTAGATGAGGGATTGTAAAGTTTTTTTTTATTTGATTT
GATTTTTATTTTTTAGAGTGATCAGATGATATTTTGAGGTTTAAAATTAGTTTATTAAGATCCTAAGGAT
GCTTTTGGGGGTGTTTTTAAGTAAAATCAAGTTGAAAGCTAGGATTTTGTTGTCCAAGTTAAAATTGTAA
TAGCGGACAACACGTTATTTGCATAAATAGACGACGTGTCGTGCACACTATTTAAAGAAAAAATATTTGG
TATTGTCTGTCATTTTGTGTGTTGTTTTTTTTTAAAAAAAAAAAGAGAGAGAGAACCAAACTCATGGGCA
TGCCCTTTCAAACATGGGCACGCTAGGGCTTTTTTCCTTTTAAGCCAAGCGTACTAGCCTAGCCTTCTAA
GCTTAGCAAATCCAGGCATTTATCTTTAATTTTAATTTGTTATTTTAACTTAATTTTATATTAATATCTT
CTTTCTCATGTTTTTTTAATTGTTTAATTTGAATACTATCTACATATTAATTAGTCTTTTAAAAGGTTTT
TATAATTTTATAACACCTCAAAGAGATTATAGTAATTTATATTTAAATTTTTTTTTCCTTTTTAAATTTT
AGATAAATTAGTTTTATATGCATTCTGCATTTATATGAAATATAATCATTTCTACTTAGCAACCAAACTA
AACCTTTAAGATAAATACATGAAAAATATATAAAATAAAAAGTGTAAAATATTTGTATTTTTATAATTCT
TAGCTTTTTGCTTTGAAAGTCAACTTTTCATTTTAGTTTTTTAATTAACTTTCACACTTTTTTTTTCTTC
TGATTTATCAATTAATATATTTTTAATTAATTATAATAAACAAATACATTATTTTTTTCATTCCTCAGTT
AACAAATATTTTTATACCAGAAACCACATGTACGAAGCCGGTATTTTCTTCCCTGTATTAAAGATTATCC
TCAATCCTACTCTCATACATTAACTAGTAATCACAAATGATTTTTAGGAGGAAAATAAAAACTCAGCCCG
GACCGGCCCATCACGGCCTGGACCGGCCCATCACGGCCCGGACCGGCCCATTTAAGTAATTACCTGCCCA
TATAAAAACGAGCCTCCCAAAACAAAACCTAGTACATTGGATGGACGGGCCCATATCCAAAATGACAAAT
AATTCACGCATGATGGGTGGGACCCTGTATTTCTTAATAAGAAAAACAAAAGAAAAAACACAGGCACCCA
CCTAACCTCCTTTTTCTTTTTTTCTTTTTTTACTGTGGTTGACTTTTTGTTAGTTTTATGCTTTTGTTTG
GGATTAATTTTTTTTAAAAATATATTTTTTTATTTAAAAATATATTTTTTTATAATTATTTTTATTTTTA
ATGTTAACATATTAAAATTATTTAAAAATATTAAAATAATAATTTGATTGTTGACACATTTTATCTTGCT
CTTGCCCCTTGAGCTTCCAAGTGAATATCCAACAACCATACTAATACATTGTATTTTATTAAAAACAAAT
TGAATTATATTTTAAAAAAAACTAAATTATTTTTTTTAAATGAATATATAAAAAAATAAAAAATATTATT
TTAATATATATTTAAAGAAAAAATATATTTTAAAAAATAATTTATACAGCAATACAAAAT
Sequence ID: 35
Sequence Length: 3000
Sequence Type: DNA
Organism: Poplar sp.
TCCAATCCAGATTCTCCGTGTAGGGCAGCTAGTCATCCTCAGTGCACCTGGAGGTACCTTTCATTGCTTC
TTTCCTTTGTTTTCCTATAAGGTAAATGCTTTCATTAGCAGTATCATGTTTTATGATCAAACTAAGCTCT
GAAGTTGAATTGATGAGAAACTGCTGATATTTTATAGCCATAGATTATAGAACATGCTAAGATCATACCT
TTTGTCTTTTACCAAATGATGGTGATGAGCACGCTGCTAAGGTTGTTACTCAGGCTGGGATGGAGGATGT
GCTGTCAACCTGAGTACGGTCCAACTTTTTGTCATTAAATAGTCTGGTCCGGCTCAAATGAACTTATTTG
TGTAAATGGACATGTTGCATGGTGGGTTGAACTTCCATTATGCAAAAAATACCCCTGGAATACATAACTA
AATTTTGCTTCAGGCTAGTCCAGCTTCATGTTGTGTTGGGACCAGCGCCAAGCAGGCAAACTTCATACTG
CAGCCTGTGCCAAATCTTTTGTTCCCCACTTTCATTGCATTTCAATCACTGTACCTTTTGTTCCTAAGAA
AACTATTGTGGCATTAAACATGCTAGGAGTCATTCTTTCTTTGTTTTGATTTGGAGTGCTATTTAACTGG
TTGATGATAACTTTTTGTTGAATTTACTTTCCAAGCACCTTTGTGCATTGTTTCCTTGATTAAATGCTTC
AACCTATGATTTTATGAGCTCAAGAATTTTCTTCTTGATTATTTCAAACAGAATTTACAACCATGGCTGG
GAGGCGTCTTAGAGATGCTGTCAAGACAGTGCTCATGAGTGGTGGGAATAAAAAATTTAACAGTAATGTT
CACGTTGTTATAGCAGGATTGACTAACACCTATTCACAGTACGTGACTACCATTGAAGAGTACGAAATGC
AGAGATATGAGGTAAGTGAATAGTTTAATGACAGATGCATGAATAATTTAATCACACAGTACATGAATAG
TTTTCTTTCTTAGGAAAAAGTTCACTGTGATATGTAGTTTTGGCGTTAAGAGAACTATATACTAGCCAGC
TTGACACGCACGGGCAGTTGGTTCATTAGCAAAAATAGGTTGCCATCTGGTTCTAAATTGGAAGCTGTCC
GAGGCTTTCAAGCACCATCCTTATGATTGGAGTTGAATGATCTCAGCACCCATTATTCCATACCAAATCA
CTATGAATTATCAAAGGGAAACCTGCAAGATTAAATCGACTGTCATGGGCTTTGTTTTAGGAATTCTGTG
ATGTTTTATTTTTTACCTTTATAATCGCTTGGTCATGATATGAATCAAAAAATAAATTTTTATTGGTTTA
CCTCCTATTTTTTATGAAGAGAATGAATCTTCTTATCGAAGGATCAGAAGAAAAGGGGTTTGAATTTCCT
GCGGGAATGATTTTGAATGTGGTTAATATCATGAAGAATAAAGAGATAGTCTATACCCAAATAAAAATAG
ATGTTCTCATAAGGAAGCCATCGAAGGCTTTCCATCCTTGCATTTATCTGTATAATTTTATATTGTGCTT
TACAATTCCTAATTTCTTTTTTTTGGTAAACAAATAGAGAATATTTATTTAGATTATGGCTTCTAAACGA
TATTGTTCTCAGGGTGCCTCCACGCTCTTTGGGCCACACACTCTCAGTGCCTACATTCAGGAGTTCAAGA
AGCTTGCAGCTGCTCTTACCAGTGGCCAGTCGGTCGAGCCCGGTCCACAACCCCCTGATCTTCTGGATAA
ACAAATAAGCTTACTTACACCAGTTGTAATGGATGCAACCCCACCTGGTGTCCATTTCGGTGATTGCAGC
TCTGATGTACCCCTGAACTCCACTTTCAAAAGAGGAGATACAGTCAAAGTAGTTTTCTGGTCAGCTTGCC
CAAGGAATGACCTGATGACAGAAGGCACCTTTTCCCTTGTGGAGATCCTCCAAGGAAAGGACAACTGGTT
CCCAGCATATGACGATGATGATTTCTGCCTTCGCTTCAAGTGGTCGAGACCTTCAAAACTGAGTACTCGT
AGTCATGCAACCATGGAATGGAGGATCCCGCAGTCTGCCAACCCTGGTGTCTATAGAATGAAACATTTTG
GAGCTGCAAAGAGCCTTTTAGGCTCTATTCGCCATTTCACCGGTTCATCAAGTGCTTTTGTTGTGACATG
AAAAACATACCGTGCATGTACATTTACCTACTTTACTTGTGTGCTTGTATTCATTTTTTTTATGTATAAT
ACTTGCACGACAGATAGCTAGCATGTGCAGCTCCTGCTGAACTTTTGAATTCCTGTTTTTGTAATGCCTG
GAGAAAAAGACATGGTTTACCACTACTCCTTTCTTAAGCTGGTGACCAGGTAAATTTATTATTTTGTTCA
TGCTGCAATCACCACTCATCCTCTGGCTTTAAATAAATAAATAAATAAAAATAACCATGGATCGAATTAA
AATATTTTAATTTGAAAATATGACTATTAAAACCTACAAATATGATAGTTTATTTGTTGTTATTTTGGAA
TAAAAAATCCACTTCAAAATTCTCTCTAAAATGGATTTATTTATGTCTTTTTTTTAATAAATATAAACTA
GAGGGAAAAGAAATCGTTGTATATTTGTTATTATTGAGTGCAGGTCGTTCATCAACTATGAATAAACCAT
TTATCAGTAACTTACTAAGTAGGAGGCAAGTCGTTCCATGAGAAGAAAGCCTTGACAGATCTTTGCACTA
ACCGACACGTCGTTTCGTAATTTCCGTTTCGAATCTCGGAAAGTAGAGTGGAAAAGAAGAACCCAAAGTA
GCTACTGTGTTGAGTTACATAATACTCTATTACCAGAGTGAAGAATCAATCATCCCTAATTACTAGATTC
TCTTGGAAATTGAATTACAGATTTCTTCTAATTTTCCAATCTCAGCTGCTGTGCAGGAAGGCTCCAATCT
CTCTCTCTAGTTGTACACTACAGGAGTTGAGAAAGCAAAAAGAAGAATCGAGGAGGAGAA
Sequence ID: 36
Sequence Length: 3095
Sequence Type: DNA
Organism: Poplar sp.
AAGGAGGAACCTGTACTTAGAAATATTTCTAAAAGGCGGAGAGGACGGGTCCATATCGTCGTATATATTT
TAAAAAAATTCTAATGGGCAGAGGAAACGGATCCATGTCGATGCCTATATTTAGAAAAATTTCTAATTGG
AGGAGGGAAACCCAATGAGAAAACCTCTGTTGACGCCCATACTTGGAAAAACTTATAAGGGTAAAGGGGA
TGGACCCATGTTGATGCCTGTACTTATAAAAATTTCTAAGGGGCGAAGGGAAACCCAATGAGGGTAATGC
TATTTCACTAGGGAGACTTTTGGTCCATCCCTTGGAGAGTGACTCAGAGGAACCCATATTGACACTCGTA
CTTGGAGGAATTTATAAAGGGTAGAGGTGACAGATCCATGTTTACGCCCATAATTAGAAAAAATTTTAAT
GGGTGGAGGAGATATAAGGGAAACCCAAAAAGGGTAATGCTATTGCACCGAGGAGACCTTTGGTCTATCT
ATTGGAGAATGGTTAGGGGAACCCGTGTCGACTCTCATACTTAGAAAAAATTCTAAGGGGTGGAGGTAAA
CCTAAAGAAGGTGATGCTATTGCACTGGGGAGACCTCTAGTCCATCTCTTAGAGAGTGGCTTAGGGGAAC
CAATATCGACACCTATACTTGGTAAAATCTCTAAGTGATGGAGAGGACAAACTCATATTTACTCCCATAC
TTAGAAAAATTTATAAGGGTTAGAGGGGATAGACTTATAGAGATTTGTGCAATCGTACTATGGAGATTTT
GGATACATCTATTCCATTGAGAGTTATGCAATCACACTAGAGAGGCTTCAGATCCATCTATTTTAAAGAG
AGTTATGTTATTGTACTAGGAAGGTTTCAGATCCATCCCTTTTAAAAAGAGTTATGCTATTGCACTAGGG
AGGTTTTAGATTCATCCCTTCCAAGAAAAGTTGTGCAATCACACTATGGTGGTTAAATTAATCTCTTTCA
AGGTAAATTGTGCAATCGCACTAGGAAGACCATGGTGACTCATTTCGAGATAAATTGTATAATCGCACTA
AGAAGACTAAGTCAATCCCATCCTCGGAAGGTTGTGGGGCTATTGCCCAAGTCGATCCCTTTCTACTATT
TATTTAAGAGTTGCTAAGTTTTGATGGAGCAGATGTGCCAACAATTATAGGGAGGTCCGTGACATGTCCC
ATTTTAGAAGTGTCTTGATTATCTGTTTTTGATGGTGATTAAAGATGTCAATAAACCACTTTTGGAAGAG
CAATCAATGATTTTTTTTATATCAAGTTTCCACAAACGACGTCAATTGATGAAGAGAGTGTTTGGGAATG
CAGTGCAAACGGCGTTCCTAAAAATTTTGAAATTGTTTTTTGCTTAAAATAATTTTTTTTATATTTTCAG
ATCGTTTTGATGTGCTGATGTCAAAAATAATTTTAAAAAATAAAAAAACTTCATTTTGATGCATCTCTAA
GTGAAAAGCACTTTAAACAGTCACCGTTACCACAATCCCAAACATGCCCAAAGTTCTAAAAAATCAAAGT
AGCTTAAGAACAAAGCTTATATGTTGGATAATCGGTTAATCTCCTGGTTCTAACAATATGATCAATTCTC
CCTGGTCAATGTGGCTGTTGCTTAATATTTGCAAAATATCACCTTTGATAGATTTGAGGACTCTCAAATG
TTTTAATAGGTATCTTTTTAGAGAGTGAAATGATATTTTAGATAGAGATGCTATGAAAATATACATGCAA
AAAAAAAAATAGAGATGGTAAACCCTTTACCTAAGTGGTTTAATAAAGAATAAATAGTCTTGAACCTTGT
CATGTTGCTTGAATGGAGGGGTTGAAATGTTATTTTCTTCTCATAACATTAATGAAAGATAAATACCCCA
TATACAACATTAATGTTGATGAAAATATGGTAGGTCTTAAATAACTTTATACACCCAAGGGTGTGGGAGA
ATATGATTTAAATTGTATTGGGTCAGTAAAAAGATCCTTTATGATAAATAAAGAATTTTTAGATGCTAAG
CTTTTCTACAGGGTTGAACCCGTTATGGCTAAACTCTTCGCTAAAACTAATTCTATTGGGGTTGAACTCT
TTTCTAAGGTTAAGCTAATGATGTTGATATTTTTTTTTTTTTTAACTGAGTTCATGAGGGCTGAACTCTT
CTTCAAGACAGAGCCCATGAGGGCTTGGGCTTGTCCCAAACATGTTGCCTTAGCCCGTGTATCTTTGGGC
ATTCGAGAGGGTTTTTTAAGACTATTAAATTTTAATTTATCAGTTATAAAAGTTATAAAAACCGAAGCAC
CATGATTGATGTTTTGCATTTGCTGGAGTTGATTCTAAATAGTTGGCAGATCCACTGTCGTCACCATCAG
AATGGAGTGCAAATTCAATGTCTTTTATATATATAAAAACTTGTTGGGCATGCAAATCCAATGGATAGAA
CTCAGAATGCCAGGATTCAATTGCTTGCATGAGATGGTGCTACCATTGGATTGGCTTTAATTTAGTTCCA
TTTGTTTTGCAACATTTTTTATTCTAATATCAGACAACAAAATTTGGGCATTCATGGTAAAATGGGTTTA
ATTTTCCTCCTCCTCCTTTTTTTTTTCTTTCTAAGTAATATTTTGAAAATGCACCAAAAATAAAAAGACA
GCGCATTGGTCCCCTAAATATGGACCGGAAAAAGCCACTTACAGGTCACAGCCGAACAGGCCCAGGTAAG
GTCCACTCACGTCCAGGCTGATCCACCCTTCCTGCCTTCCTCCCTTCCTTCCAATTGAATCAAAGTCTAG
CCTCGAGCGGCAAGATTTGAAAATATAATTGAAAGGGACGTAAAACCTAACTATAGTTAATACATAAACA
ATGAAAATACACCACGTCAGCAATCATTGCCGTATGTTGCCCTTTCTTAACCAACCCCGGTTAAAAAATC
CCCAAATGTCTGTCCTATAAATAACCATCACCCAAGTCCATCTCCTGCAAAATCTTCCCCAGAAGGCGTC
TTGATAAACGCTTTCGTTCCAAATCTCCTTCTTTCTTCCATCGGATCTACTTTTGTTGTTTTCTTTCGTC
TCTTAATCAGCGAAA
Sequence ID: 37
Sequence Length: 3000
Sequence Type: DNA
Organism: Poplar sp.
CATTCCACGGAGATATCTGAAATCGTTCTCTTTATAGTTTTTGATGTCCGCCATGGCGTTGACAGGAATC
GGCATCGCTTCCTCCGCCAATTTCTACATCATTGGCTAAGGACAAAGACCGCAAATTCCATTCTTGCAGT
GCCTGTGCTGTGCTGCAAAGCAACCCCAAAACCCTCAACCTCAACTCTCCTGGGAGGCGTGCGAAGCATG
GTGGAAGAGTCACAAAGAAGATCTGTCAACAACGGCAAAACTAGTCCATCCTTCAATATCTTAAAAACTC
GACGACTTCTTTTTCAGAGCGTGATCTGCATGCACTATCATTCTCAATATCTTGCTTCTCAGGATACATA
CAGAATCCTGATCAAATGCACAGGCACAGCCATGTCAATCACTGTCACCCACACCTGAAAAAAGAGACCT
TCTGATAATTCACTCCCAGGCACAGCCATGTCAATCACTGAAACTCACACCAAAAACGCATCCTGAAACT
CATTCTGCATTTTCACTCTTCTAATTACCTAATTCTCTTCTCCTTCCTCTATCTTCTAGAAGCTTGTCCG
ATAAAGATTATGATCCTCGAAATTGGAGCCGTTCGATCAACTCTGAATTCGATGACGATAACGACGACGA
ACAGGGGGGGGGGATAGGAGTTTGGATCTGTTGCTTAAGTTTGTTTCAAATGTGTTCAAGAAGGTATCGA
AACGTGCTACAAAGGCCGTCCGATCGGTTTTGGCCGTTCCTTTATCCACTAAACTGGTAATTATTGTGAA
TTGGTTCTCATTGAATTAATTTGATGAAAATGATGGCGAATTGTTTTTCTTTTCGGATTAATTTCGTAGG
TGGAGTTTTCGGTGAATGGAGTTTTATTGCTGGCGTTTTTGTGGGTTCTGAAAGCTTTTCTCGAGGCAAT
ACTTGGTATGTTATACTTGATTTTCTTTTTTACTTTATACATTTCATTCAAAGCTCTGAGTAGAATGATT
CAATTGTTTGTTATGCTACTTCAGTGTGCATGTCTTTTGCAGTTCTGTAAGTCCTGGGTCTGTTCGTTCC
CAAAATCATCGAAAATGTAGAAAAATGTCCATTTATCTTTTATACAGTGCACAGTGTCTGTGCACTTGTA
CATCCAGAGGAGGGGATTTCTCTCACTCTATGGCATTGGATGTTAGCTGTTCTATGCCCTTCTGGCATAG
TAGTTGCTCATGCTGGTGGAACTTCTTGAACCAAGCTTGGGTTTCTACACTTTGAAATGTGAAGGACTCA
ACAGTTGTAACCACTGTTGTTGAACCATGCTTTAAAATTAGGTCATTAATGCTTAGCAAGTCCGGCCTTG
AGTTCATGTGCATGAAAATATTGCTGTAAGCCAACTGTGTCATAATATACTTTACTAGATACAGCCGTAG
TGATTTGTGAGCCTTACGGACATTTATTTCTATGTCCTCGTAGTGTATGATTGCTGCTCCCTTGCTTTCC
TCACAAAACACTCGGTAGTCTCTGAAAACATGACCATACTTGTTGGAATCAACGGCTTGAGATTTGTAAA
ATTCGAGATGGATTATTGCCTGGATATATAGTTGTGATATTATGCCGCTCATCTCTCTGTGTTGGTGTTT
GAAATGCAGGTGGTTTTGCACCCTTGGAAGTGTGGTGCTTGCAAGCATCTTACTTATACGTGGGATGTGG
TCTGAGGTAATCTCAGGAAGGATGAACTCGATGACCCCCGTGTATGGACTGGCACGCAGCCTGCAGCTTG
ATTTTTCATTCTTAGAGCTGTAAATGTACTTGTATTTATGACATTCTTCAAGAATAAAAGCATCCTCGTA
ATCGAACTTCCCAAATCAAGGATGATGAAAAGATTTCATCTGAAGGTTTCACACGTCAAAATTGCTGCAT
TGGAAATAATCTGCTCATGTGAGAAAGGGTTCCCCGCATAAAGATCCAGATCAGTGAATCCTTGTAGAAA
CTGGAGGAGATCAAATTGAACGTACGGGGGCAATTTCCCCTTGTATATCTTCAATAGATAGACACTAGCC
ATGTACTCATTAATATGAATGATAAAAGATTGTAGTTATAGAGCTTTTATCCTTCAACAATTTAGGCGCA
ACCGTTGAGCTCGTTGGGTATTTTAGGTGCTTCTTCAGGGTTGCGGTGTAACTTGTTTTAGGATTTTTTT
TAAAAAAATTTATATATATTTTAGATTATTTTGATGTAATGATGTTATAAATAATTTTTAAAAAATAAAA
AAAATAATTTTTAAAAAATATTTATTAAAATAATATTTTAATATATTTATAAACAAAAATATTTTAAAAA
ATAACTGAATATAGACTCGCAAACCCTATGCACAATGAAGTAAAAGCTCAATGTTTTTATTTTTATTTAC
TATTTTTTTAGCATACAAATCCAATGGTTAGAACCTATAATGTCAGGATTCAATTGAACATTTAAGAAAA
TAGTTTCCCGAGATGATGCCAGTATAGGATTCGCTGCATCTGTTTGGCAATATTTTTTGTCAGACAGCTA
AATTTGGGCATAAATGGTAACATGATTGTTTTTCCTTTATTTTATTTTTTTTAAATGCACCTAAAATTAA
AAAGACAGCCATTGGGAAAGGCCACCACTAACTACCAAACAGGCCCAGGTAAGGTTCACGTGTCCAGGTC
CACCCTATCCACCTTCCTTCCAATTGAATCGAAGGACTTATTAGCTGGCCACGAGCGGCAAAAATTTTAA
AAACAATTGAAAAGACAGAAAACCTAACTTTGGTTAATAAGACTCAATAACAACCGACCACGTCATCGCT
GATGGCCGTTTGTTGCCCTATCTTAACCAACCCCGGTTAAAAATCCCCAAATATCTCTGATATAAATCAC
CACCCAAATCCCCCTGTCATTTCCATCTCTTACAGAGTGATCTCTAGAAGGCGTCTTCATAAACGTCTTC
GTTCCTAATCTCCTTCTTCAACAATCAGATCTATCTTTGTTGTTTCTTTAATCAGCGAAA
Sequence ID: 38
Sequence Length: 3122
Sequence Type: DNA
Organism: Poplar sp.
ATTTTGTTCTTCATTTAGAAAATTAGTGGTTAATATTTTCTAATTTGTTATAGAAAGATGGGATTTAGAG
AAAAAGGGACAGAGTAAAATAAAAATAAAAATAGAGTAACTAAGTGGCTATATAAAAATTGGCATGAAAA
ATTATTATAGTTTACATATTGTTCTATGGAAACATTTTCAATCCTTTTAGTTTTTTAAAATTTAACTTTT
GGTTCAAAATTTTATTTTGCTTATTTTTTAGTCTCTAGATTTAAGAGATGAGAGATACTTACTCGTATTA
ATTGAGGAGAAAAGAAATGCCGGTTTGTGTTGATTCCAACCATTAAAATAATCTATTTTGATGTCAATAA
GTTCATTTTAAATAAGAGGAGTTCCAATAAGACGTCACTTAGCCTTCATCTTCACTAAGATGGTAGATTT
GGGCTCATGAAGTGTTTTTGAATATGTGTTGATTCTTGTTTTTAAAACTAATTTGTTTTTAATTTGAGCC
TATATATGAGTTTATTTAAGTTTTTAAGATGTTTATTATGTGTTTTTGAGTAAAAATAATTCAATAATAT
GTTTTTCAGATAAAAATATTATTGGTCTGACTTTTTAACCACTTGAGGTTAGGTGTAGTTGAATTAGAGG
CTTAAATATTGTTTTTGGATTAAAACAATTCAAGTTGAATTTTTAATTAAATCGCACATGCTGATTCAAT
TGAAATTACATTAAGAGTCATCATACGGTAAATCTGGTGTTAGTTTGGTGTTATAGTGCAAATTACTTTT
TAATTAAAAGATAGCAATGCTTCCAGCATGGTGGGCTCGTTTTTCAAATCGAAAGCTGCTTCTTCTTCTT
TCTTTGTTTTTTTTTTTTAATCTTGTTTTTCTAATTTCATAAAAACCAATCATTATTTCGCAGGTCAGGT
AGTTAAATTTGTTTGGCTAATTGATCCAGAAACCTCCGGAAAGTCAAACTCAAATAAACTGCTGACCTTT
TTATTTATTTTTATTTTTTGAATTCTAATTCGTCGGACTATCTGGTCAAGATAATCCACCTCTCATGCGA
ATACTTCTTAGAGTGCCATCCATTATACCCTGTTAAGTTGCCGGTGGTTGCACATGTTTGACCACCCTCC
CTCCCCTAATTTTCACGGTGGAAAGGGGCTTGTTTGGGCTTGTTTGAAATTATAATAATAGTGATTATTT
AAAGTGTTTTTTATTTAAAAATATATTAAAATAATTGTTTTTATTTTTTAAAAATTATTTTTAACATGAA
AACAACATGAAAACATAAAAAAAATTGTTTTCATCCTTTTTAAAAATATTTTTTTTTCTATTTTTTCTAT
TTTTTTTCAATATTATTATATAGTTTTCTTATTTTTATTTTTCTATAGTATTATTAGGTTTTTCTGTTTT
TTTTTTTAATTTAAAGGAAATAATTTTTTTTATATTCAATATTATTAGAAATTTCTAATTTTTTCTATAT
AAAGGATTTTAAAATTGTAATAACATTTTGACAAGAAATTTAATGAATAAAAATTAAATATTCTAGATAT
CTCTTCACAGTTATGACATTCTTGGTTTTAATTTATAATAAATCGCATTATCATTAACCCTCGGCTAAAT
TATCTATTTATTTATGACCATGGAAACACAAGTGCGTGTGTATTTGGGGAGGTGTGGGTTTAAAGCCTGC
AATATAATTGAAGAAAAAATTTAAGAATTTTTCCGCGTTGATGAAACCCTGATTGAAGGTTGGAGCATGC
CTCAATAGGCAGACGGGCGAAACTTAGAAACCAGGAATAAACGTGAAACACGGGATTCACACGAATTTGG
AAATCCACGCTTGTAAAGAAAACCAAACCGCATAATTTTATTTCCTATTTGTTTTCGCGTCTTGTTTTTA
AAAAATTTAAATTTTATTTTATTTTTTTTTCTTTAAATTAATATTTTTTTGATAATTTTAGATCATTTTA
ATATGCTGATATCAAAAATAAATTTTAAAAAATAAAAAAAATATATTATTTTAATATATTTCTAAATAAA
AAACACTTCAAAAAACAATTATAACCATATTTTCAAACAAGTACTATTAAAAAAGTGATGGACAAGAGAA
ATCAAGGGGTCGCGGATGCGCTTAAGCTATAGTGAATGACAACTAGTCTAAAGTTAAAACTTAGACCTCC
TCGCGTAAATTTTATATTTATATTTTTAATATTAATACATTAAAATAATTAAAAAATAATTTAAAAATCA
TTAATTCATACAAAATTTTTAAAGCATATTAAAAAGAGAATAAACGGCAAAAACAAACCTACGCTAATTG
TGAAATAAAAGATTAATCTATGCACACGGTATCGTTTTACTTCACTGGTCGGTGTAATAATTTCTCTAAC
CTTATGACCCAACAATTCACTATTTTGAAACCCTTGTTGTTATTTTTTTATCAACCTTTTTCTTAATCTC
CATTTCACTCATTCCAGTTGCCTGGACAGTGGACATGGTGGCGGTGCCTCTTGATCTTTTCTAGTTGGGC
CACATGAATACACTTCAAGGGATTTGAAACTAGGCCTAATCGATTGAAACGTAGAATCCACTCTCTAATT
GAGAGGACGGCCCACCCTCCTGGGCGACGTGCCCTCTCATCCACCAGGACCACCACCATCATGCCTTCTC
TGCTCCTTCCTCACGCCTCCCAACAGAATGACATTATTACCCTCCATCCCAACTATAGACCGGCAGTGGC
ACAACTGCAATTTCCTACAACCCAAGACGATCCCCAAAACTAAATTCAAAAATCAAAATGGAGCGGGCAA
CTAACCATGGTTAAAATAACGATTCGGCCAACCTGGCAAAATCAAGAATTAGGTGGCTTGGGAAACGGCA
TCATTGGCATGCACCTAATTTGACCCGTGGTTAAACTAACCCTGGTTAGCTAAACCACACACTCCCTCCG
TCCCCTAATTTCTCTCCCTCTGAAAGTATATAAACCCCATACTCACAGACCTAAAAAGCTCACCCCTGAA
ATTTCATAGGCGTCTTGATAAACGCCACCCTCCCTCAGCATCAATTCCAATTGTCTTTGCTTTCGATTTT
CTCTTCTTTTAATATCTGTTGATCTTTGTGCTTTGAGAGAAA
Sequence ID: 39
Sequence Length: 3000
Sequence Type: DNA
Organism: Poplar sp.
ACAAATCAGTATTTCAAATCCCACATTTTAAATTACCAAAAAAAAGAAGAATACCCTTAAATTTTGAAAA
AAATTAAAAATTATACTTAGCAATATACCCAAATGTTTTCAAAGTATTTCAACTTTTTTTTTTATAGTAA
AAAATATTCTTGAATTAATTTATATATCAATAAATTTAAATTATAAATACACTTCTATTTTTGTTAAAAA
AACATTTGGAGATTCTAAACCTAATTTAAAGACTGTGTTGGCCTAATGCAGCAATTATTATATAAGATTG
ATGTTGTTTGGTATTGCGTTTTAAAGGGGAATTGAGTAAATTAAAAAAAAAATTTGTTTAAAATTATATT
TTTCTATGTTTTTGAATTGTTTTGATGTATTGATATTAAAAATAATTTTTAAAAATTAAAAAATATATTA
TTTTAATATATTTTTAAATAAAAAAATACTTTAAAAAATAATTTTAATAATTTGACGTAATAAGAAATGA
CTTGTGTCTGATTGATGCTTAGCAGACAATAATAGCATTGGGAGAAGCTGAATCTGCTATATATATATTG
GATTAAATTGGCAATCAGGTGGTCTCCAGAAGGTGATCTCGAAAACAGATTTTTTGGTGCATCTTTTTCT
CCAATGCCCCCTAGAATCTAGTTAAGCTTGTTGAATTTTGGTGAGCTGACGGTTAAAATATTGAAACCCA
CAATTTCAATTTTATATTTTCACAAAAAAATAATCCTTGAAATATTATAAACACAATCTAAGCACAAAAA
AATCATTTATAAACAATAAATTAACGCATGAATCAAATTAGTTGTTTTAGATCTAAAAATTAAAATTAAC
ATCTCTCCCTATTTTAGGGATGAAATAGTTCAATTTTGATATTTATAAATTCGTTATGATGAGAGCTATC
ATTTGCTGATGTTATAGCCTAATTCCTTTAACAAAAATTTCTTTCTCCTTTCTCTGTTATTTTTATTTAT
TTTTTATTTTTTATGATTTTAAAATTTTAACGTTTTTATTTAATCCAAAAAAACACATGGATTAACCGGC
CTAGCTTTTTTTAAGGTTATAAAATCTGGATAACCTCATTAAAAAGAAACAAAAAAATCATAAAGCTGAT
TTTTAAAAATAAACAACATTGGAAGATAAAATTAAAAAAAATAAGTAAAAAAAAATACCCCTTCAAGGAG
GCATCACAACGTTTGGTTGTTGAACGGTGCTTTCATGCACCACCCGAAAGACGCAGGCTTTCTCACCTAC
TAGCACGTTTGTTACACGCACTAATCATTTTTATTTATATATTATATTTTAAATTAATTAAAATACATAA
TTACCTCTTAGTCAAATCTATTATAACAAAAAACCTAAATGAAAACACGAAAACGCTTTAAAACGCCAGT
TAAGGAAATTTTGCTTTTAAAAGTAAGCTAATTATTTTATTCTACTTTTTGGGGGGGGGTAAACTTGGGC
TAATCTTCCAAACCCACAGCTCGTGAAATCCTAAATCTAGGTTCAATAAAGAAACTTAATTTCATACCAA
TTTAATATTGAATGATGAAATCGAAAAATAAAACCATATTAATCTAAAAGTTCTATTAAAGTAAAACAAA
AATAGCAATTAAAATAATAAAAATCAAATTTAATAGGAAAAAAAATTAAGGATGAAATCGTAAAAAAAAA
TTCATTCTTAAAAATTACCTTAAATAAAATAAATAACAATCAAAAGAATAAGAAAAAAATATGACAGATG
AAAAAAATTAAAAGAGGATGAAATTGAAAAATAATTTCAATTTTATAAATTATTTTAAATAAAAAATACT
AATAAAAAGAATAGAAATCAAATTTGAAAAAAAAACAAATTGAATAGCTGTTTTGAAAATTTAGAAGGTC
AATGTGATATTTAAGGTGGAGAGAGAAAAGAAGAAGAAGAAAAAAAGGCCATGAACACCAAATCAAAGAT
GTTATATCACACGCATTGTCGAGGAATGGAGGGGCCACCTAAAACAACCAGACGATCGTGAGGTCTCCCA
ACATGCCAACATTTTTTTTTAATAATACTTCATATTTATTAAAATACATAATTTCCCCTAAGTCAAATTG
ATTATAATAAAAAAACAAAAAAAGTTTTTGTATGCTAATTTACTTTTGTTTTTGGCATTTAAAAGTAATT
GTGTCATTTTACATGTTAAAAATAAAAAAAAGTGTCATATTACCATGTTAAAAATATAAAAATACTAAAA
AGACTATGTATTAAAGGTATAATTCTTTTTTTATTTTTAAATGGAATTTCGTAATTATACTATGCTATAA
AATATGAAAAGAATAAAAAAAATCCTTCGATGAAATCTATTATATATATATATATATTGTTTTTAAGAGT
ATTTTATTATGCTAATAAAATATTAACAAATTTATTTGTCATTAATTAATATGATAATATCTAATATATC
ATTTGAAAAAAATCATAATACTCTCTGTAACAAGCTTGTTGGGTTTTTACAAAAATAGCGAAAGAATCAT
TCGTGAAGTGTAAAACTCTATGACTTTTAGATTTTTAAAAAATAAATAAATTAAATGGGCTATATGAGAT
GTCCCCAGCACTATTGTAGCCCTGGTCCTATCTGGTGGACCGCCAGCTTGAGTTGCAATAAAAGACCATG
TTAATTCTACGAGCCCATAACACCAGTCCAAATACAGCCATGTCTATTAAACACTGATCCGCCCATTTTA
CTCCATAGTTATTGGGCGCCTTCCAGAAATTCAAATTTCAAATTTATTCTCAACGGTTACTGCCAGCTGG
ATCCCAGCAGCAGCAGCAACCATTTCAAATTTCAAAAACACCCATCTTCTTCTTAAAAGCCGTTTCAAAC
GGCCCTTTCTCTTCGTATATATATATTCTTAATTTCCGAACCCTAAATCACAATTCTCTTTGCTCTGTTT
AGCACTTAGCAGTTGGCCGAATCTTGTTTAATACAATTTCTCTATTTCCCACAACCAAAA
Sequence ID: 40
Sequence Length: 3131
Sequence Type: DNA
Organism: Poplar sp.
TTCTGGAATTTGATAAATTATTGAACACATATCACAGGCATCCTACTCTGTCAAGTGACATTAGGAATCT
TGGTTGTCTTCCATGTGTTTGTGCGTTTGTCTAAGTAAATTCTTGTTTTACCTGTTACTTCTGGTTGAGG
TCTTATTTCTATTATCAGAGCCGGCAAGAGCCCCGTAACCACTTGAAAAATAGTTCAAGATATTCACTTA
ATACTAACAAAATAAAAATTGTCCAAGACTCACATGTCACCATGCATAAAAAAAAAAAATTAAATATTTT
AAAATACCTCATTAATAAATTTACCCAAGACCCCATTCACCTTAAATCAAGTCTGCATCGTATATATATC
AAATTGATGGTAACTAATTGCATGCAAAAGCTTAATGAAAAGGCAATACATCTAGGGTGGTCTGCCATCA
CTTGACAGCGAAAAAGGAAAGAAGCTCTCGTTTATTAATTTTACTACCAGAGAGATATGTAGAGGAGGGG
ACAAATAAAATGAACTGTCCATGTTCTGTCATTTTCCTCGTCTACTACAAACTTGGACACACAGGGTTGT
TGTAATGCCAGCAAATTCTTGGGACTTAGATGCCCTGTCGCTCTTCCATTTCTGATTGTGATCAATTCCC
ATCTGCAGATTTAAACAACTGCAGATTTAAACATATAGTATACTCTTTGTTCTTGGGATTTTGTCGTTCC
TGATATGAATGGGAGGGGAGAAGAACAACCTTTTCTCTTTACACTCATCAGATTCATTGAAAGAGATGTA
GGCAGAAGGGTGTTTTTCCTTGTAATTTAGCCGGCATGTTGTTTTGCTACTTGTAACTATATGTGTTACA
TCTTTAATAAAAGCAGCTCTGTTGGTCCAACCCCCAGCAAGAAACCAAATCTAGCTCTTGATTTCGAAGC
TTCATCTCCAGATTTGCAGGTGACCATGATCATGATCATGGCTGCTGCATTAACCTTGTGAGATAATGTG
GTTGCTGTTATCATCAGCTGATGATGTATCCCTTTAATTTCTCACTTATTCTATCACCTAATTACTCGTA
AAGGAATCAAGATTAGGGGTATGGTAGTTTGGATAATTAACATACATCACAGACTTACATTGTTCTTACT
GAAACTTTCTATTGAAATATTAATTACAAAAAAACTAATAACCAAGAGTATAAGATTTTGAGGTTAGGCT
GGTTAATAAATTGATTTATTATATTTTATATTCAAATTTAAAAGTTAAAAGGGATTAGAAATACAAGATT
TCATTAGTATCCTGATATGAACGATATATTTGGTATTGTTTGATTATTGTCTTAATATTACGAAGATTGT
GAATATAAAAAATATATAATTTTATATACTTTTTATTTTGAGAGTATAAAAATTCACTTAAAAGTTATTA
TAAAAACAAATTTATTTTATATTTTTATATTTTATATTTATCATATGATACTAACAAAATACAAAAATCA
ATTATGAAAAATCTATTTTTATCGTAAAAAAAAAAGTCGGAAAATACCGGAAACATTAAAACCGAAAAAC
AAAATTATAAGATTCAAAAAATGCAATTAGAAATCTAGCAACTTTCTTTCGATTGTGAGATGTTGGATAC
CACACAACAACTCTTGTAGTAGAAGATTCAAAGATTAAAATACAAGATAAATCATTGTGGAGTAAGATAC
AGAAGAGGAAAACCATAAAAAAACCTAAAAGCAAACAGAAGCAACAAACAAGATCATATGAACAGCAAGT
GAAACAAAAGCTCATGATCTCTTGAAATGAACACCGCACCCACCTCCCAAACGGTCCTCCATTTTTCTCC
CATGCCCAATATTACCCTAAGAAACTTCCCTTATCTCCCATTTTTGTCCCTTAATCCCAACAAAATTCTA
GGTCAGATGGGCCGTCATGGGTAGGCCGGCAAGGTCGGAGTGGGTCCCGAGTAAGGCTGGCGCCAAATGG
CATGGCCCCCTTTTTTTCTTTCTTTAATCGGATTTCAAATATTTTATCAAATTTCATTTGTTTCTACTTC
AAGTCATCTTGCCCGATTCAAAAATAAAATAACAAAAAAGGAAAGTGGAAGAAATATATTTTGGTACTAT
GAATTAAAAGTATTTTCACTTTCATCCCATTTAAATTCTCCGACATTAACTTTAGCTTCTAAAAAAGTCT
ACTTCAGTCCCTAACCATTAAATAATAGTTAATGGAAACCAGAGGAATATCCATTATTTCCTTATATTCC
TTTCATTTTTTCAAGTTTTCTTTCTAAATTTCTTTTTATGTATCAGAATATCTTATTTTGACCTGAAAAA
ATAATATTGATTCTTATGATGGATTTTTAGTAAAGATATAATTTTTTTAATTTTAGTGATTATTTAAAAA
TAGTGTTTTTAACACATTGTCATGTTTATTAAAACTAAATCATTAAATTCAAGTTGAATTATCATGATTT
AACACATAATAAAAATAAAAACAATTTAACTTTTATCATTTGACATCTCTCGTCTAATCTTAAATCTTGT
AATCAAAATCAATTATTATTCATGTTTTCATAAAAATATAATCAGATTCAAATAGGACAAATAAATGTTA
TAAATACAGAAGAACATAAATATATTTGGTTAGGAAAACAAAAATATAAAATAAATTTATATATAAGATA
TTTTTATTATTTCAAAACATGATGAACAGATTGTTTCAATAGTTTTTTTGTTTTATAACAATGTATGATG
AAGAATAAAATATTTTTAAATTTATAATGATTAAAAGTATAATTTAAATAATTTTAAAGTAAATTTTTAT
TATTTTGAAATATAAAAAAAGACCATCTTAATCATTTATGCGAACAGTAATTAAACGACATCTAATGGAC
TAATTAAAATTTTAAACAATTAAAAACGGAATGAAATGTTTCGGAATCTATAGGGATCGAAGTATAGTTT
ACCCAAAAAAGCAACTCTGCATAGAGATACTAACCTAATAAAAATCTTTTTTCATCATTTGCAGCCTGCC
TTTCATTTTTTTCGATCTATAACAGCAACGTCGAAGAAACAAAGAGAAAGAGAGAGCGTTTTTGTGTGTC
TGAACAGAGAGAAAGAAAGAAAATTTGAGTGTTTAGAGTGAAGGAAAGAAG
Sequence ID: 41
Sequence Length: 3021
Sequence Type: DNA
Organism: Poplar sp.
TTTTTTCATGCAAAATTGAGTACCAACTCAATATCAGAATTTTTTTTATATAATGTAAAAACTTGATAGA
AAACAATTCAAAATAAATTACTAAGTTAAATCACAAACCAACATAATTGTGCTTTTAAAAAAAATTTAAT
TTTTTTCTTTAAATTAAGTGCTTTTTTATGTTTTTTAATCGTTTTGATGTGTTGATGTCAGAAATAAATT
TTAAAAAATAAAAGTATCTCCGAGGAGAAATGTTATTTTGAATAGCTAAATTGATAAAATAGCATTTTGA
ATAGTATAAATATGTCTTTTTTTTACCATGGATACTCTAATAAGAAAAAGCTATTTGAAAAGCTAATTGT
ATTAGAGTAGGAGAAATAAACATTTTATTTTTTTTAATGAGTTTGATGTTATTTTTTTTCTACGTGACTA
TATTTAATTGGTTTATTTTATTGTTGGCTCCACTTTATTGGTTTTAGCTTTTTTGAGAGATATGTAGGAA
TAACATTTGTTGAAGAGAAAAGACATTTTGACATTTTGTTTAGCACTCGGAATATATAAAATAAGCATGA
AAGAGCCAAAATAATATATATATTTTTTTAATTTTTGGCTTTTCATTTAGCACATCTTTTGGAGTTGTTT
TAAAAATTATTATTTTGATGTATTTTTTAAAAATAATTTTTATCATTATTTTAAATAAACCCGAACACAT
GTTTTAACCATCCATCAGTAAGTATGATGGCCCCAAAATAATATATATATAAATTACTTGGCAAATGGCA
CAACATATATATATATATATATATATATATATATATATATATATATATATATATATATATATATATATAA
TAGAAAAATGTAAGTGGATTAGTTCAATTATTGATTGAAGTGTGTCTTAACTTTGACATGTTAGAATAAA
GCAAAGAAATGAAAACGTGTGTGTTATCTATTTAAGAGAAGAGGTTCAATGGATAAAGTAAAATAATTTA
CGTAAGGTATTGTTTGCTTTTTGTATTTTAAAAATGTTTTTTTTTTAAATTGAATGTTTTTTATTGTTTT
CTTATTTTAAATTAATTATTTTTTAATGTTTTCATATTATTTTAATATCCTGATGTTAAAAATAATTTTT
TTAAATAAAAAATATTATTTTAATATATTTTTAAGTAAAAAACACTTTAAAAACAATTATTATCATACTT
TTAAACATCAAATACAAAACTAGTCATCTCTATTTTTGAAATATTTTTGAAATTTTTATCGTGTAGTTTA
AAGTTGAAACCTTGTAATAACAAAAAAATAAAAAATTCATAGTTTTAATTGCTTAATTGTTCCTAGGGAG
ATAACAAGCCCACAAATTGCTTTAATAATATGGATTATTTTTTCAATTAACATAGTAAATTAAAAATATT
ATGACAATATAATTGAAAATAATAATAAAATAAATGTGTTTATACATGTTATAATTAACAAACATGATAT
GTATAATTTATCACTATTTAAAATAGCAACATTTAATAAAAAATATTAAATGAGTAAAAGAAAGAAGAGA
TGAGAGAAGAGAAAGAAAAAAAGAAAAAGACCTTCAAGATATACCGAATTTCTGATTACAATATCATCAA
AAAAATCTCAACGAGACAAATCGAATGACACCAAAAAAGATTACCAACAATGATTTGAGTGGGTCACACT
TACCGTCCAAAGGTGAGAGGTGACTCTGTTGTCTTTAGCGGGAAATGTGACCCACTCAAATCATCGTTGA
TGAACTTTTTTGGTGTCGATGAATTTGTCTCGTCAAAATCTTTTTGAGAGTACCGATGATATTATAATCG
AAGCTTTAATGTGTCTTCATAATCTTTTTATTTATTTTTTTTTATCTCTCAAACTTATTTAATAGCAACA
AGTTATAAACATCATTTTTTTTTAAACTATAACATGTATAAAATGTGCTATTTTTTTTTATTTGTTCACC
AATAATAAAAAAAAAAAAAGTGCTAATAGCCAATAATAGTGTCTGAATTAATGCATCAATAAAGTTATAC
GACCTTAAACGTACTCCATTAAATTTATCCTTCGATTTTCTTCATACACTTTGGTGTTATTCTCCTGGAT
ATTTGCACAAATTCACCTTGTGTGAAATCAAGCACATTAAAGATTTAAATCGGATTGCTTGAATTATTGA
TAAGTTGCATACATAGCCAGATGAACTGAAATTTTGGAGCTTTTTAAAAGTCTGCCACCTTTCAAATGAT
AAAAATATGCACGTGTTGTATTTTTTTGCATATAAGTTTTTTTATATAAAAAAAAAAACAGTTTTATTTT
TTTAATTAAAAAAATTATTTATTCTTTTGTAAAATTAAAAAATAATCAAGAGAAAAAAAACTTATCTAGA
CTGGGATTCTTAATTGCAAGTGTTTCTTATCGAGTAGGATTTGATTGTTTTTTTTTAATTTATTTTAAAA
ACGTTGGTTAAATAGAAAATCTATTTAAAAAAACAATTAATCTTTTCTACCATTAAAAAAATGTTTAAGT
TTTTTAGAAACTCTATTTAACTTAATTTTATTTAAAATAAATAAATAAATATTTTTTTATTAATATGAAT
ATCCGGATTAGTTTAAAATATTTTTTTATTAATATGAATATCCGGATCAGTTTACGCGTACTTTAACAAT
GTTATTATTTAAAATATTTTATTTAAAAATAAATTATTATCAATTTTTTTTTAAAAGGTGCTGGTCTTTT
TTAAAAAAACTTAAAAAATTGTAAGAAATTAATTATGCAATCCCATCATATATTTTGAGCATGACGTGAG
CCACAGTAATCGACGGGCAGCAGCCGAGCTAGCAAAAGAAGCCAGCGCCATACAGTTGGCGCCATATAAC
TGGCAGTTAAGAATCTTCTTTAATTAATAAATTAACTAACTTTTTATTCAGCAACACAAAAGAAAAGAAA
AGAGAAATCTCTTCATTTCTCCTTTCTTTCATCTGCATTATAATCATTGTTTAGAGAGAGAAGAAGAGGA
AGGAAGGAATT
Sequence ID: 42
Sequence Length: 3118
Sequence Type: DNA
Organism: Poplar sp.
TCACTCATTTCCATATCTTGTAGGCTAGATTTGTCTGGAGCGATGTCTATACTGAACTTGTATTGTTTGA
CAGAAGTGGCAACCAAATCTTTCCACCTTTTAGTCTTAAAATTGTCAAGCTTTATACTAAGGCCATCTTG
GAAAAAATAGATAAGTAGTTTCTCATTGTGGATAACTTAAGCCATTGTATTGTAGTAAGCCTTTAGGTGA
GTCAGTGGGCATTGCATTTCAGTGTATTCAGCAAATTCAGGCGCTTGAAAGTCTTTTGAAACTGCAACAT
TTAACACTAAACACATTTTAGCTGCTTTCACTAGGTTATATAGATTAGACTCTTCAATCATCTTCATTTT
TTCATCCAATTCTGCCTATTTTTTGTAAGCCTTTTCTATAAGATTCTTTTATAGAGCTTTTTCTCTAGTT
AAACCTACCACAGGAGGTAGCCTTATGGGGTAAATAGGTGGGAAGCATAACAGCTGGATATGAGGGTTAT
TGTTGTTTGAGGAATTAGAGCTTCCACAAACCTTATTCTTAATGCTTACTTAAGTAGGCTTGTTAGCCTT
TCCATGTCTCCCTTAAAGCTCTCTATTTCCTTCTGATGTTCAGATTCCAAGCATGCACGCTCTTTGTTCT
TCTTTAGCTTCTTTTTGGATCTTGTGTTAAAAATTCACTTTAAAAGGGGACCTATATTTCATTAATCTGA
TGATGACAATTAAAACTAAAAATATGTTTGCATATGAATGCTTATGCATGCTTATGAGAATGTATATTGG
GTATAGATTAGCCCTTCCGAGCGAATCAAACATCTGAAAGCAAAAAAGGTCTAAAAAAATGAATATGAAT
AGGTTTTCTACATGGTCTAAAAAAAGATCTTAGATTTGTCTAGTGATAGTCTTTGTAAAGATAGTATAGG
GACGTTGCGAGGATTGGTTAAGGTATGTATGTCCATCATTACTAAGCAAGCACTTAAATATGAGTTGAGT
TTTCATGACTCTAAACCCTGACCCATAGTTATTGTTGGATAATATCGGGGCAAACCAATATTTTTGTTAT
GTTTATTTACATAACATAGTTAATTAATACATGTTGTCGTCATAATTTTATAGAGGTTCGATAGAAGTCA
TGGATGATCGTTCATGGATGTATCGGGACTCACCCCAAGGATTGCGGGGGATGGATTATTGTAATGGGGT
TCAGGGTTTTATTAATTTCGCAACATCTATCCCGAGAAATTTTACTGATGGCGGTATTAAGTGTCCATGC
AGGAAGTGTAAAATAAAAAGTTTCTGCATCAAGATGTTGTAACGATGCATCTTCTAACCAAAGGGTTCAT
GGAGGATTACCTGTGTTGGTATGTACACGGAGAACTATTTGTTCCTAATGAGAGCATGGTAGAAAGGTGG
TTGGGTCAACTTTTAGTGCTAGCAACATGCATGAAGTTGGAAATGACAGCAGTAATCATTACAGGAATAT
GGTTATGGATGCAATGAGAATGAGTGAAGGTAATGTCAGTAAATGTCCAATCGTAAAAGAAGAATCTAAT
GCAGATGCAGTAAGGTTTTTTAACCTGTTGAAAGATTATGACAAACCATTATGAGATGGCTGCACGAACC
ACAATAAATTATCGACCATAGCTCAAGTATTTACCATCAAATCAGATCACGGGTTGAGTGAAGGGGCTAT
AACTTCTTGTTGTTGCCATTATTGTTCAGGGGAAATGCTGATGTTTTGGGTAGGGTGTGGCCGTCGTGGT
GGTGTTTTGGGCAGCATAGAAAAAAAGGTGTTTAGGGTCTTCAATGGTTGTTCCCAGGAACTAAACCCCA
TGCAAGAAATTTTTGGAAGGAAAAATCCAATCAAATCTCCAGGCAATATAAGAGAAAAGGATGAGGTTGG
TGGCTAAGGTTTTTTTTGGTTTTTTTTTTTTTAAATTTCACGATAAAATTTTAATATTTAATAAAAAACT
TTTTAGTTATTAATTAAAATATAATAATAATCCTATTTAATTTTTTGATGATTTATTTTTACGCGCCAGC
TCGAAGATGAATGTGTCATAAACTTCAAGATTCAAAAGAACAGAGATAAAGTGGCCTTACTGTTCCACAA
TCAACATTTGATTTGGTGCCTAAAGTTAGAAATGAAAGTCTTGCTTACTTTTGAAGACCCAGTGAACTTT
GGGCCACATGCCGTCGAAGATCGGGGGTTAAAAATCCAAAAGCTATACTCTCTGAGCTGGGTAGCTAGAG
GGTCTTCTCATAAGAACATGCACCACCAACTCCCGTGATTCATGAACAAACATTGCTCCACAATTAAGAC
GCAGTTCAATGGGTGGTTGTCTTGATGGTCACGGGCAGAAAACTTGTTGGTTCTTTATCTCTTACCGTAT
TGCAGAGTCTCTGCTGCATCATGGCAAAGGACTGGTTTCGAAGCAGCAATGTTGACAGAGGACACAGGGC
AGGAGCACAGAAATATATTCTATCTGGCCCCAAAAGTCTTGTTTCTGCTTCAACATATCTTTTCTCCCCT
GAACCTTCCATTTATTTGTGTGTAAATGAAAGATATTTTGTAAATTTTCTTCGTACGTTTTGTGTTATCG
TCCTCATCGAGCACAAAAAAATGAAAGATTGAAAATGGATTGTTTGAACGTAGTCAAATGAATAAAAAAA
GAAGCAAAACCACCTCAAATGTCTCTTCACTGCTCAATTTAGATCTAAAAAAAGCAAGCCAACTCATCCG
TCCAGACAACCAGAATCTTTAAACAGAGTCCATCAGTTTCCTCTTAAGAGTTTAACTAAAAATTAACTTT
ATAAAAACTAATTTTTGACAAGGACGTGGGCCATGGTAACCGACAACAGCCGAGCAAGCCCAAAAAACCA
GCACCATAGAGCTGGCGCCAAGCGGCGGACCCCATTTGGCGCCACATAAGTGGCAGTTAACAATAAAACA
GCAACCACGAATTGATAAATTAACTAACTTTACCTTTATAACATTCATAAGAGGAGAAATCTCTTCTTTC
TCTCTAATTTACATCTCCATTGTTGCATAGAAACTCTCTGAGCTTCTTGGAGAGATAAATATATTGCTTA
AAGAGAGAGAGAGAGAGAGAGAGAGGAAGAAATCAATT
Sequence ID: 43
Sequence Length: 3149
Sequence Type: DNA
Organism: Poplar sp.
TAATTAATTGTGGCAGGATCACAGTTCGCAGGCGCTCGGATCTGTCTCTGGGCCTTAATGTTGGTGAACA
GTGAACACCCAAAAAGAATGTTGCCAGTGGGCTCTTTAAGGCCCAGTACGAGAAAAAAAGCATCGCAATG
TTTTTTGTTGATGGTCCCAGGAGCCCGTTGTCTGCAGAATGGGCTCTTTAATAAAGCTCTCGATGATCAT
TCCAGATAGATTTTTCACGTCAAAGAGTTGCTTTCTTGGTTAAAATTAAGGAGTTTGCTTCTTTTATTTT
AATTTTCCGGGTTCAAATCTTGAAGTTAATATTCAAAAAAAAAATTATTACGCAATCTTATACATTTAAA
AAAGAAAGAGAATCATAATACTTAGACAGAGAACAGTGAAGACAAATGATATATGGATACAAGAGGGGAC
AAATTACATACATGTCCATGTTCTGTTTGTCCTCATCCGCCATGTACTGTACTGGATATATATATATATA
TATATATATATATACAGACACACACACACACACACACACACTTGTTGTTGTTGATTAATGCCAGCAAATT
TATGGGACCTTGATGATGCCCTGCTGTTTTTGTTTTTCTTTCTTCATTTTCTGGTCGAAACCAATTTAAT
TTCCATTTACAACAAATTTAAAAGCATGTATTTACTCTCTGTCATTCTATATATAAATGAGAGTGGGAGA
AGAACAGCATTCTCTCTGTTTTCTCTGTAAACTTGCCAAACTCTCATAAGTAGCCACCCTCTTCCTTTAC
TGCTATGCTATATTAACTCAGTAAAGCATGCAAAAAATGATTAATTATTATGGTGAAAATTACCTATATT
AGATTTTGATAATTGAGGTTGAGTTTTATTTTATAGATCTAAGGCTTGAATTCATAATACGAGCGCGGCT
ACAATTGCACATATATTTTTAAATTAAAAATATTATTTTTGCGCACATGTTTTCAAATGAACACTAAGTC
TAATAATGAAAAACTTATTTTCAATTTTTTTTATGTTCTTGTAATTTAATTAATGCATATTGCACTAGTG
TTTATTAATGGTAATTAACTATGAGTCATTGTGCAAGCTACTAATTAGGTGAGAATAGATGGAGAGGAGA
TGGTGATAAGAACACTTGATTGGATGCATCTTTGATTTTGTGGCAGAAATGATAGTTTTTAAGAAGAATT
GAATTTTTTTTATTAAGTTTTTTTTTAATGTTTTTATATTGTTTTAACATGGTTATATTAAAAATAAATT
TTAAAAAATAAAAAAAATATTATTTTAATATATTTCTAAAAAAAACAATTTAAATACCAAGCAGACAATG
ATTACACTCCCTCTCTCTGGTGGCTATTTTTGAAGGGACTGTTTGAAGGAATATTGTAGCCATGTGAAGG
CCACCTGAGTGAAGGCATTAATAAATGTGGTAAGCAACTCTGTTGGTCCAACGCCCGGCAAGAAAACAGA
GCCACCTCTGGACTTCGAAGCTTCATCTCAAGACTTGCATGTGATCATCTCGGTGATTAATTGATCTGAA
ATCTGATCTGAACCTTTAGTTAAATCGGATTGAAATTAAATCAATTTTAATTAAATAAAAAATAAAACAG
CATTGTTTTATTTTTATTTTTTTAAAATCTTGAAAGAATTCCGTCTTGAATTGATTTTAATTTATCTATC
AAACTAATAACTCTGATCTTGGGCCGAGCAAGGGATGACCCGAGCAGCACGTGGGAACTTAGTTTTATAC
AATAGTAAGTGGAATTAAGAGAAAGAATGAGTTCTTTGTGTACCGCAGTTTTGGGTCAATCCCCAAGAGA
GTGTTTTTATTGTATATTGGAAGTAGACAAAAAAAGAGAAAAAGGGATCGACTACTTCCATGTTAATTAG
AGGGAAAAGAATCAAAGATTAATGCGGCTGCGGCAGTTGAGATTTTCAAATTTGAACCTCAAGATTTATC
TCAATTTGCTCAACCATGGTCGGCAAAGTTTGAACCAACCTAGGTCACAATTCCTAGGCTATGATATTAA
AATCCAGGTCATGAAATATACTCAAATCAATTAAAATTATTTTACAAGTTAAAATGATATTCATTTGAAA
TCAACTTTGAATTGTTTTGTTTTTTTCTCTATATTATATGAAAAACTACATCTTGAATCCACGGACATAC
CCTGATTTAGACAGTGTTCAAGAATGATGTTGAAATTATATTTTTTAAAAATTTGAAATTTTTTTATGTT
TTCAGATCGTTTTGATGTGCTGATATTAAAAATAATTTTTTTTATTTTTTTTAATTTTAATATATTTTTA
AACAAAAATAAACTTTAAATATTATAATTTTAAACACTATATTAATCGATAAATGTGTCACAAACATCTT
AGCAATAAATATTTGTATATGGTATTTTACAACAGCTCACAGCATCTGCAAATGCACATGACACCCACCT
CCCGAGCGGTCCTCAATTTTCCACCTATGTCCAATATTACCCTAAGGAACTTCTCTTATCTCCCATTTTC
TCCATTAATCCCAACAAAATCCACGGTCAATAAGACAGCAAGTTTGGAGTGGGTCCCAAGAAAGGCTGGC
GCCATATGGTGGGGACCATTTTTATTTTTTTTATCGGATTCCAAATCTTCTATCGAATTTCATTTATGTC
TCCTTCAAATCTTGCTGTCCAATTAAAAAAAAATAAACAGAGAGAAAAGTGGATGGCTATAGTTGTAGTC
CCTATAAATTCAAAAATGTTTCATTCTTGACCCTTTGTTTTAGATTCTCCAACATTAACCATAGTTTGTT
CTTGTTTTCCGTGTACATAATGCAAAGTTACTTATTGTTGATTTCCATTAGCTATCAGCAACCAGGGGCT
ACATTGAAACATATTGGAAACAATGAGACTAACATCATCGACACGTTTTTTAAAGTACATAAACCGGAAT
GAAATGTTCTGAATCTATAGAGGTGGAAATATAGTTTACCCAAGAAGGCAACTTTGTATAGAGATAGAGA
GAGACTGAGATCCAAGAAAAAATCTTGCATCCTTCTCTCGATCTATAACAACGTCAAAGAAACACAGATA
GAGAGACTTTGAGTGTCCGAACAGAGAGAGAGAGAGGAGACTGTGAGTGCTTAGAGTCAAGGAAAAAAG
Sequence ID: 44
Sequence Length: 3007
Sequence Type: DNA
Organism: Poplar sp.
TAATATATTAACTTGGTTAAACCGACCCTAGTTTTTTTAGTTGTTTTGATAATTGTTCTCTAAACACACT
TATTCTACTGCAGGATGGCTTAGAAAGGAGAGGCTTTAAGGAAGTTGGTTTCTTGAATGCAGTGTCTGAT
GTGGTTAGCACAGGTAATTTAGAAGTAATTATGCATTTATTTTTGCATGTTTCCCCAGTAATTTGGCTAT
GTTAACCTGCATAAGTTGGTTTCTTAATGGTCGATGATTGATAATTTTATGGCAGGTGTAACACCAGCAG
AAAAGCTTTTGGAACTTTACCATGGAAAGTGGGGGCGGTCTATAGATCCTGTTTTTGAAGAGCTACTTTA
CTAAGGTGAATTAGATTTTTGTAGCACTGCAGCAGTGTCCTACTGTGTAATTCTCTCTCTCTCTCTCTCT
CTCTGGGTTTAAACCTTGTTTATGTTCTGAACTACTTTCTTCAACTGATACTGATAGTTTGTCTGTCTTT
TGCCGAATAAATTTCAATGTAAATCCTTGGTACGAGGATTCTCACAAATCTCTCATCGAATAACACCCAG
ACAGTTTGGAACCAGTGAACAATTTTTTAGCTTCCATAGCAATAACAAGCCGATCATGTGCTTTTCACAA
GCATTCATTGTAACGTTTCCCTCCTTGTGTCACGCATCTCATTCTCATCATCCCTAATGAAAATGGTTAA
CCCGATTTGGTATCTAATTCTATTTTCACAAACTAACCAGGTTTTCATTGATCACAGTATGCAAATGGAT
TATGAGGTTGGTGAAGTGTGTAACAGAAATATGAAAGGAGGATCTAAACTTAAATGCTCCCTATTTTCAG
TTCAAACACTGTTACATGGCAAACAAAATGTCAGTACTCATTTTAAGAATGATGGTAGCTAGCTTCATTT
CATAAAAAGTCTGTTTTCAGTAACATCCTACATTTCCCCACAATAGTAGGACCTTCAATGCTCTTCTAGC
AAGTATTTAATTGTCAATTGCTTGATTTGCCTTTTGTTTCCCTAAAACCTTATGTGATCTTGTCCACCAA
CCCTATCTCACCAGGTCACCCTCCACGTCCGAGCCATGTGGGCTGCCAGCACCCACCAGGTACCGTGTGC
TTCCCATACCCGCTAGAGATACATACCCCACCATATTACCATATAATATGGTAGCTATCCATGCCACTGT
TTTGTTTAGTCAAATGTATCTGGCTGGAGTGAGAGGTGTGAGATTGCTGCCCGGGGGGGGGGGGCGCTTC
CTAACATAAGAGGGTGGTAATTTAGATGGGGACTGGCCATCATCCCTACCACTCTTGAGTAGGTGTTGAA
TGGCTTGAAAACGATGCTATAACAGCAAATTCTTAGACACATATCCATGAACATCATCAAATCTTATCTC
GTGCTACCTTTTTGTCTGTTAGTGAAGTAAAATGCTAGTATGAAGTTTTGAGTCAAAATTCAGTCAGCTA
TCATTTTCCCATTCAATTTAGCCTGCAGCAGATGATGATGATGATGGAAGTATACTGAGATCTGTTGAAT
GTTTATTATGTATTTAGGTTTAATAGATTATATTAGAAGCAAACTACCAAATCACACTTTTCTCTTTTGG
CTCAATGGGATTTTTTTGAACCTCAGACTACACAATGGGATTATAAAGTATCCATATTTTCATATAATCT
CTTCAGGTGATGTGAAATCATTTATCATATTATAGGGAGGACTTAGCATAGGATCCCAACATCAAGAAGC
CAACTAGTCCTTGCGGAAGGTCTGGAAGGAGGGCCAGAAAGAATACTTGTTTAAGAAGAGAGAGACAGAC
CGAAAACAGGACGGTCTCATGCCCTCCAATAATTGAAGCTTCCTAGCTCTCACCCTTGTGACACCACCCT
TAGGTTTTACATCGCAAATTAGGCACCTAATTTGATCTTAAATCACTAATGCGATCTTACACCATGATAT
TTGTGGCATAACCACCTTATCAGTCTGAACATTACCAGAGTACCCTCCCTATATGTCTGTCATCTCATTT
CTGTCCGAGTGACCAAGTTGTCTGAAAAAATCTCGAAATAATGAAGAGGTTTCTATTGACTGCCAAGTTT
TATTGATATGATGCTAGACCGTAAATTTCTACCAGGTAAAAATTTGCTGGCAATGTGGTTACCTTACCTG
GTGCAATCAAGGTACTAGGAAGAAGATTTTAATTTCCTATATATTTGCACGATCAGTATGTTCTCTATAA
TATGACAAGAACTCAGTAGTTATTTAATATTTTTGCTTAAGAAAACAGTAAAACTCTACAAGCCACCAAG
GAATTAGAGATGTTCATCAAAAGAAAGACAAGGCGTTAAAGAGTGAGTAAAGGGATCAGCATTCATGAAA
TGTTCTCGTTAATACACCATTCCAGAAATGGTGGATTGAAGTAAGAAGGAAGTTGATAATAAAATAATAG
AATTCCATCCAATCATTTTGGAGGAGAGCAAGCTCAAGGCAGAGAGAGAGAGAGAGAAATGGAAGTAAGA
AGGAAGAAGGAAGTTGATAATAAAATAACAGAATTCCATCCAATCATTTTGGAGGAGAGCAAGCTCAAGG
CAGAGAGAGAGAGAGAGATGGGGCAGTTTTGGAATCTTAAATGACAGACAGACAGAGAGAAAGAAAATCA
ATCATACTGGAGGTTGGGTTGGCTATTTTAGATTGAGTGAAGCCAATGTATGATTGCAACTTCTTGTTAT
TATTATTATATCCATGTCCAGCTCACAACTCTTGTTGGAGCTTGACATGTTCCCCTCCTCCTAACGGAGA
CACATCGTATTATTCATTAAATTTTCTCTATATTTCACACTTTCTGACACGGAAGATATCAAACTCACCT
TCTTAAAATCCTACCCCTCTTGCACCTACAAAAGCCCTGCGACTTTACATTCTTCGTCACTCTCTCCCCT
CCAGTCCCCTCTCTATATTTCTTCTCTTAACATTTTCATTTTTTTTTATTAAGACTAACCAATCAAG
Sequence ID: 45
Sequence Length: 3000
Sequence Type: DNA
Organism: Poplar sp.
AAAATGGGCCAGGGGGTTGCTCCTTTTTCTTTTTCTTCTATTTTTATTTTTTTTTATATTAATGATTTTT
TCTCTATTTTTTTTTAATTTATATATAAATTAATATCCCTTATCTCTTTTATTTTGTTTGAAGAGCCCTT
TTTAAACGATAATTATTTTTTTAGTGATGCATTTAATTTCGAAGAGTTTTTGTGATTCATCTATACTTTT
TTTATTTTTTATATGAATGAATTTTATTTTTGGAAATAAAAAAAATTATTTTTAGATAATATTTCTAATA
TGTGCAGCTTTGCATGATGTTTTTTCCCATTTTATTTTTTTCGATCAATTTAATTTGTGTGTCTATTTCT
ATTATTGTTTGCTTAAATAAAAAAATTAGCAAACACAACCAATTAAATGTCTTGTTTTTCGAGATTAAAT
AATTCGATCAACATTTTTCTTGATCAATTTAATTTGTGTGTCTATTTCTATCATTATTTGCTTAAATAAA
AAAATTATTTTAATAAAAAAATTAGCAAACAAAACCGGTTAAATGTCCTGTCTTTCGATATTAAATATCT
TGATCTATATTAGTGTCTTGATTTTTCAAGTTTTATTTTGAGGTATCGTCAATGACTTTTTTATTTATTT
ATTAACACACATAGTTTTTGAATTATTTGATTACATGCATACATAAAATTCTTAATTTGAGCTTAAATTT
TTCAAACTACAGTATGAAATCTTTTTATAAAAATAAAAATATCTGAGTCTCAACATTGCTGCGCTAGTCC
CATAACTAGTGTATCCTAAATCCTGTCCAAGTTTTTGAAATCCAGATAGAGGATGATGCCAATTACTCAT
TCCCTTTCAACGGGGCGCTGATTTAAGATTTGAATTCTTTAAAATTAGTCAAAGAAAGAACACAAACACA
CCCTCCCCCCCCTAATTGCACAGTCCATACTCCATCTTTTAAGACTAATTCATTCTTCCAATGTAGGGAA
GGATGCCGGCAAAAAAGTGCATAAACCCAAGTGGCTTTGCAATTTCAAGTTTAATTTATACACTATCCCC
CCCCATCTCGGTGTTTAATTCGTGTCGACACTCTTGGCTGAAAACGTCGTCTAAAATCAAGGAAGCGAGA
AAACAATCTCGGAACCAAACAGTGCCATTTCCCCATCGGACCGCCCTGTAGAGAGTCTGCTTTTGGATAA
AAAATCACTCTCACATTCAGAGACCTAAGCGATGGCAGCATGCTTGGCTCTCAATCCAAGCAAGGAATCA
GTTTTCATTAATGGCGAGGATTAGTGGAGGAGGGAGGGTGTGTTAATTAAGCTGCTTTAGGTACAGAGTC
TGGATCCCGTGATTATGATGTTGAATCCATAGGAGATAAGGAGGAGAGTAGCTGACAGTTCACATGGGGA
CATCCTCGCCTCATGTGGCCCTTCTAGCAAAGCTCTTTCCCACCTTTTTTTTTTTTGTCCTTTTTTGCCA
TTTGAAGAAAGATGCTTCTCTCCTCTAATCCCGTTCCGTTACTTAAACTTAACAGTGATTCTTAATCAAT
GCAATTGGCAACAGTGCCTTCTTCTGATAATAAAATACGTGAAAGGCCCATCGCGCTCCCAAGAGCTCAT
CATTCAACTTTTTACCCTGTTGATATCTTCGTATCAAAATTATTAAAAATAAATAAAAATATTATTTTAG
ATAAAAATTATTTTTTTTTCAAAAAAACGATTGATAACCACTTTTCTATTCCCCCATTTGTAAATGTGAT
TCCATTTGAGTCCCCAAAAGTTAAAAATTAAGCAACGCTGTCCTCGAATTTGTGTCCTCTATTTGCTATC
ATCCTACCTTATTTCTTGCCTTCTCGTATCTTGTTCTCGATAATAAAGTTTTAAAATTCGGCCCAGCTTG
ATCGGTTGATCCAGGACCCGGCCGACTTAGGGCTGTAATCAAGCCGGGTTGAAGAAAAAATAAAGGAAAA
AAAAACCATGTATGACCCCGCAAGATCCGGTCAAAAACCCGGTTACAACTCGTTGACTTTTTTTTTACTA
AAACAACGTCATTTTGATTTTTTTTTTTAAAATTGACCCGGGCGACTCGGTGACCCAGTCAAAACCCAGA
ACCCGGGCCTTGAACCCGGCCGGGTCTAAAAAGTAAAAACTATGCCAGATAGAGCGGCCTAGGCACCTAA
TTGCAATCATCTGCACGTTGGGACACCAGTTTGTAATTTTCCCAAGAATAGAATAAGCACAAGATCTGTC
GTTTCAACAGGTCATTATTAGTCCATTAAACCCATTTTTCAAATATCAAATATCATTGCCCTGTCAATTC
AAAACCAACATCTACACCGTTGAACATCACGATCCAACGGCATCCAACGGACTAAAACAAAAGGAGAGGG
AAACCACGACAGCCGTCCGATCCACACACCTCCACCCCTATTTTCCTCCTTTATATAACTACTCATTCAC
TCCATTTTCAAACCAAATTATTACTTCCCTCCTCCATCACTCCCTTTGATCGAGCCTCTCCAACGCTCGA
TCTCTGAAAACCTCACCGGAGACACCGCATATTTAAATCCGGTCACCGATTTCGTAACGGTGAGTTCTCG
ATTTCTAGATCTGATCTCTTCTTCCGTTATCGAACCTGTCTTGATGCCGAGAAAACATAAGAAAACAAGT
TAATATCTATTTTGTTGATGAATAATTATTGAATCTTATTTTTCTGAGTGAATTACTTTGTTTATGCAGT
CTCATTGCACTTTCTGTTTTTTTGCATTTTCTCTGCAGCCAAACAGGCTGGATCTGTAATTATTCTGTTT
AGACTTTTTGTTAATCTTCGATCAAAAGCTTTATTTAGTCACTTAATTAATTATTTATTAAGATATAATT
GTCTAGTGAAATTTACTTACGTTTTAGATCTGTTCTCCATGTTTTAAATTATAATTTCTCTTATGCTTTA
CCTAGTTTTTCTCTTACCATTAATTTAATCATATTTTTTCTCAACTTGCAGAGATAAAAA
Sequence ID: 46
Sequence Length: 3000
Sequence Type: DNA
Organism: Poplar sp.
ATATACGGTTTTAAGAATACTTAGTTAATTAATACTGTTTAAAGTTATCCATAATGTTTTTTTTATCTCT
TGTTTTTTTTTATTTGCAATTTAATTATTTTATATTGAGTTGATTTGAGATTAGAATCAATTTTTTTTTT
AACTCTATACAAGGCTCTCACGGTGTTAATAGTAGATTTCAATGTTGAGTTAATATTTAATTTAACAAAA
TAAAATTTAATTTTATTAATTTAAACTAATTAAAATTTTAAAAACCTAATTTAAAACTGGAAAAAATATT
CTAAATTTTTTTTTATAAAAAATAATATCTTTGTCTTAGTTTTCTAATTCAATCTTTGACTATAATTAAA
AAAATTATCATAATTTATTAACATATATAACTCTTAATTTATTTTACTATAAATGTTTTAGTTTGTAGTT
AAAAAAATTTTAAATACCATAAAAAAAACATTAACAGCACTCACGTTTTTTTTTACGCCGAGAAAAAAAA
AAAAAACTCTATCATGTGGTGTAACACGTGGAATCAGACTAATTTAAATAATGAGGAGTGAAAGAAAATA
ATTGTCAATAAAGTTAAAAATCACATTTATAAATGATAAAATTGTTATTTTTGTTAGGTGTTACTTCCAC
GTTATCTACGAAATTGGAGAGAAAGGTTTACGTGGGCCATTGCAGAGTTTGTTTTTCCCTTCATTTTCTT
TCCCCACACTCTCTTTTATATTCCCCAACAACTGAAAATATCTTGAAAATTGCATTTCCTCCCTCCTCAT
TTTCTTGCCCTCCACTTTCCACCCTTTCCAGACACTCTTGACTATTGATTCGATGAGAGAGGAAAAAAAC
ACGTGATCAAATAATAGGGATGGCAACGGTTATCTATAGATTAGATTCTTTATATGTATACATTTTCTAT
TATTTATAGGATAAAAAACTTAGATATTTATATAATATTCATTGAGTTTCAAGCATCAACATGGACATAC
ATTGCCTTATTTATTATAAAAAAAAAATAACAGTTTATATATATAAGCTGTATATAAAATATAAAAGGTT
ACCTTTTAAAAACAGACCATAAATACCATACCTTTAAAAAACAAAAATTGTTAAACTTGCATCCAATAGT
TTTTTTGTCTTTTCAATTTTTTTTTTAATGATAAATAAGCTCATAGAGTTTACTTGGTCTTTTACTTAAA
ATGAATCTTATAAAAACAAATAAAATTTGTTATTGTGTTCAATATACCATTAAACGAGGGGGTAGTGCAT
GTGACGTCATTCACTTTCAATCATTGACTTTCAGGATGATGTAGAAAACATCTCGCCATCTTTTATATAT
TGGTGCCAGGCATGTATATGTTGGTGTGGTGGATGAACTCCAATGAACTTTTATTTTTCTTGTCATTGTC
AAAATATAAAAGTGTTGTTTAATTTGTTTTTTTTTTTAAAATTTGATCATCATTTTTTTTTAATATTTAT
TTTATTTTGTTTTGTTTTTTTATCTTTTTTAATTAATTGTTTTATTCCATTTCGCTCCTCATCATTTAGT
TTCATTTAATTTTTATATAAGATTCGATCCTTATTTTTCTGATTGCTATTTTTTTTTTAATTGATTTTTT
TCAATCTCTTCCTGCATCATTTGATTTTAAATTATTTTTATATAAAATCTAACCCCTATTTTTTTTAACT
ATTATTTAGTTTGTTTTCATCATTTTTTTATTGTGTTTTTTTTTAATTTCATCCCTCAATATTTTGATGA
TTTAAATTTTTGCTTTGTTATTTTTTAGGGTTTGTTTTTTATAGGATTAGTCTTGGGCTCAAGACCCGAG
TCATGGGTTTTAGAAGTTAACACATGTTGATTTTTTTTTTGTCCTTTATTTTTTTAAAATTTTATTTTTC
AAGATTTAATATATAGGGAACTAGTCTTCGTGTTTTTTTTGTCATTTTCATGGAGTTATCCCAATCATGT
GATCATTATCATAATATTAGCGAGTTAACTTGAATTTTTTTTGTTGTTTTTTTTAACTATTTACTTCTAA
ATCTTGTCCTTTAACATTGAATTATTTGGTAATTAAATTTCATAATTTTTTTTAGCATGCTTTTAATAAG
ATAACCTCGATATTATAACCAGATATAGATTCATGCTATCCTGAATGTGCTGAAGTTATATTTTTCTATT
ATTTTTTACATTTATTATCATTATATTTTTTTTATTTATATTATTTAAATTGATAAAATTCATTAAACAT
AAGTGAATAACTCAAGTCTTACTCGCAGCTTAGCACGGACCGTATCCAGTCACTATCAAACGGCATCTAA
CGGGCCAAAAGAAAAAGAGAGGGAAACAATCATAGCCGTCCGATCACACAGCCTGGCCCCGACCTTCTTC
TTATATACGCGCGGATTTTACCATCTCTGCACTCCACTCTTCACCCGCTCCCTCTCACTTGCTAGATCGA
GGCTAACTCTCACTCGATCGCCGGAATCCTCGCCGGAAACGCCTCCCTGTCACACTGGTTTCCGATTTCT
CAACGGTGAGTTTTCATTTCCAGATCTGATTCCTCTCTCATTTCAAGTCCGTCTGGATACCGAGAAAGAA
CATAGAGAAACCGCAAAAAGCTGAATTCATTCTGTTTTATCTTTCCGATTTGAACTTGTGGATTCAATGC
TTTGTTTTCTTAGTTGTCGCGGCTTTCATTTGCTTGCATTTTCTCATAAACCAAACAGGCTGGATCGGTG
ACAACACATTGTTTTAAGCTACTAGTGTGTTTATCTCCGCTATTTTTAGTAATTTAATTGTTCTTTGCCA
ACAGTATCTTCTCCTTCGAGGATGTGAAATTTGTTTCGAATTTCGCCTGCTGTTTTTTTTTTTTTTTTAA
CTCAAAATCGTACTTTTAAATAGAGTCTCGGATCTGATGTCTCTGTGCAAAATTATTATTTTTTTCGAGA
GTGCTTAATATTTTTTATCCGGCTTGCCTTTTTTGTTTCTGCAGAAATATAACATAAAAA
Sequence ID: 47
Sequence Length: 3000
Sequence Type: DNA
Organism: Poplar sp.
CAATATTAGCACTAATAATTTAATATAAGTGAATATTTAGTGACAAAAAATATTAAATATATTATAGAAT
TTTGTAAAAAATTTAGATAATATTTACATTAATTACAAGTCCATTAGAAAGCCCATCAGAAAACCCATTA
GAAAGCCCAAAAAGCCTAAAAAAGCCCAAAAAAACAATAATACAGGTTTTCCGGTTTTTCTGTTAAAAAA
ACCGAACCGAACCGAAACCGGTCGGTTTGAACCGGTTCCGGTTCGAATTTTTCAGTTTTTCAAAATTTAA
TTTTTATTAGTTTTTTAGATAAAAACCGAACCGAACTGAAATTACTCACACCTACTCCAGCGTCTTCTTT
GTTTGTTTTCTTGGTTACTGTTCTCTCGTGTTCTTGTTTGTGTTGCTGGATTCGCTAATTAATGACCACA
AGGATTCCACATTCGGTCCAAGACAATAATCAATCAAATTATATTCACTTAATTCCTCTTCGCTTTATGT
CTTAATCATCGAATGATCATGAACGAGGGCCGTACACGTGGAATTATTGACCTAAAAATGAAGGAACAGA
TGAAGTCCAAGTTCAATTTAATTATTCCCTAATAACTGCTCTGCCTGTCTCCATGATGTGAAATCTTCAA
TTGGTAAAATGAAATAATAGCATGCATAGAGTAAAAGGAAAACATAGAGGAAAAATAGAGCTTAAAATAA
AAGGGAATAAGTTGAAAACCGAGGTGAAGAAGAGTGTAAAATATTCTATCATAATATATCCAGAAATACT
ATTCCTTTGGTTTTTTTTTTTTTTAATAAAGGATTTGGAATCAAAACTGATATAAAACTATCAAAATTAA
TTTATGCGATGATCAACCTTAATTACCCGTCACAAACCATAATTAGACTTGATATCTAGGTTGAAGAAAC
TTTTCAGACTCTTTATTTATACCTTGGACAAACTAATAGGCTGCCAAAATATTTTTTATGCATTAAAGAA
TCATAAACTCAAACCTAAACCCGAAAATAGATTGATAAAAAATAATTTTTTTATCGTCTAAAAATTATTT
TATGATAAACCCAAATCTAAACCTAAGCCCAAACCCAGGCTTAGGCTCGAGCACAGACCAAACATGTGTG
TGTGAGACTTTAAGTCCAAAACCCATTTTACTTAGGTTCTATTTTCTCTAAAAGCTTTGGTGTAATTCTT
TATATTCCCATTATATAAACTATAAAAAAATCTTGTTTCTTTTCTATGTGAGATAAAGGGTTTTGAATTT
TTCAAATTGAACCTTTCTTAGTGAAATATTATTGAATTTACTATGCCAAATGGTGAACGTAATGTCTTTA
ACTATTCAACCTTTTATATAAACTAAGATAATAATATTCATATAGTTCTCTAAACAGAGATTTTATTTTG
TTATCATGGTTGTGTTTATTTGGGCTAAAACAACTTTAGGCTTCACAAGAGCTTTAGAAAAGTCAAACTT
TTTAAAATCCTTAAAGAAATAATTATATTTCTTGCTCATATAGGTGATTTTTTCACTATAAGTATTCTGT
TGTATTCCACTTGATATATCAAGATATGAAAATCATTAATAGTGTACAACTCATCTTCTATCACAGCACA
ACTAACACGTTTTTATCATAAGAATATGCAAGAAATAATAAATTGAAAATGTTATACAACTTAATTTTTC
TATTTGAAGTTTGATAGTCTTCATTTAAATAAAAGTATTTTAAATTCATAAAGAAAGAAAAATATAATTA
CATGTTACTAATACCATCATCTTACTATTACTATCATGCCATCATAACTTTACTATCACTTCAACTACTA
GCATAATCATATAGCTAGTATTACAACCATCATAATTAATATTATTATTTTTATAATTATATCCAACATT
ACTACTACTATTATTTCTAGTACTACCTAGTAATTTCAATAGAGATTTTTTTTAAAATATTTTTCTTAAT
CCTATAAAGAGATCATTGAAATATTAATTTATATTTCATTATATCATTATTGTTTCTTTCTTTATATATA
TTTGATATTGTGATAGCTTTTACAATTACGGTTGAAATTAGTAGATTTAAAAAGAAAAACACTTTTAGTT
GTAGTTTTTTAAAAAATAGGTTTTTTTTTAAAATATATTTAGTTAAAATTTCTACATGCAAAATAAATGA
AAGAAATGTCATTTTAGTTTTTATAAAATTAAAATTTGAAATACAATATGTATAGGGTCAATATAAAAAA
TATAAAATATTTACCGAACTAAATAATTTTTTCTTTATAGATAAATAAATAATAAAAACTAGCACAATAC
TGATCGATATCTTCGTGGTGATGGCATTCTTATACTCATCAACCATTCCCAAATCCCAATAGTACGAGGA
AAAAGCCACACGCGGGGTGGGTCGATAATGGCCGTTCTGTAAATCATACAAGAGCAGAAGGAAATGACAA
CGCTGGCCATTAAAAGCGGCAGATGAGAACATGGCTGTAATTCATCTGGGAAGATAGCAATGGCTCAGAA
AGATCATGCCATGCCAAACAAACACAGGCCATTCATCCCTTTCCCCTCCACTCTATCCAAAATTCTTTCC
CCGTAATGAATATTCTATTGCAAGTGCCAATGCGACCTCGTTTGAAGAATGCAAGAGCTAGCTAGTTTGG
CCCACTTACAAGAAATCAAAGGTGGAGGCCCAAAGATTGAAAACCAGATGCTGTAGAGAGTCTCAAGACT
CTACAGTCTACACACGATTATGCAATTTTACATGATTGGAAAATGGAATGGTAGAGATTTGGAGACACAA
ACGCAAAGCATAACCACAGCCATACATTGAATGAGAGGCTATCCATAATCTAATCCTCTCTTATTTTTTC
TCCAGTCTGTCTTCTCTCAAACCACCCTTCTCTACTTGTAGTGCTGCTACACCAACACAAACACTACTAC
TACTACTACTAGTAGTTCGAAGAGAATTTCTGCTTTTGTCAGTGTGTTTATCCTACCATA
Sequence ID: 48
Sequence Length: 3168
Sequence Type: DNA
Organism: Poplar sp.
TGATTCGCTTGCCTTTAGCTTTATTTCTTAATCATGGAAGTCATATATATAATCAATCACGAACCTTTAG
CAGCGAGGAGGGGGAGGGAAAAAAAAGATTTCAGAGAACGAGGACCGTACACGTGGAATTATTGACCTAA
AATATGAAGCTAAAAGACCAAGGAACCGATGCAGTCCAAGTTGGTTTTCCAGATAACTGCTGCGACTGTC
GACGAAGTGAATAAATTAATAAAAAGATTTGGAGACCAAGATGATTCCATGTATTTATAGGGCATTGAAC
ATGGCTCTGCTGCTTGTAGCTTTGAATCACATCAATTGTTTCTAGGTCTAACCAGAGCTGGTGAAATGCG
CAATTGGCCACCATGAAAATTCGACATGTCTCTAGTCTCCTCTTCTTTCTTCAAAATTCGGTGGAGTTCT
AAATCCTCACCTCGCCTGTTGCATGAATTTAGATTTTGAACCCTCCAAAAAAATAAAAATCAGCCGATGG
GAAAATGTCAACGGTGATTTCTATCATGGCTGCCATTCCATCAAGAATATAATCATTGAGAGATTCATCG
ATGAAATTATCACGCCAAACAAAAAAATTCTATTGACAATAATCTCATTAGTAAATTCACTGGATCTTCA
CCCGAACCAATGAGAGTTGCCAACAATTACTCGATGAACTTGTTCTCGTATGAACGCTTAGACGATCGGT
GATTGCTGGCTCGATCCAGATTGTGGGGTCCTAACGATTGAGACACTACAACACACTCGTATATCCTCGA
TCGTAATGTTGGAGATACTGCAAATCCAATTTTATCGGGTCCATCGGTAAATCTAGCCTCCAACTACAAA
TCTGGATCGAGTACTAGATGGATCAAATATGCATCCCCGTATCTCTTATGTAATCGAGTGTTATATATTT
CTTGGAAAAAAGTCATCAAATATAAAAAAACATAACTGAAAAAATATGTTTAAATCATACGTACCATGAA
CTTCTTGACTCGGGTATTTATGAGCTACTGCACCTCTTTCTGTTTGCTTTTATTCTGCTTGTGAGTTTCA
ACAAAAAGCTCCATTGGTCTTGGATCGCGCCCAAGCACTGTAGCCTGTAAAAGAAAGATATTGTTGGTTA
AATATTTTCATATAATACAATAATTTTAAAAAGAATTGTCATATAAAACAAAATCTTACCATTTGTTTTG
CATGTGAAATGAATATAATGAATCCGCTAGTGTGTGTGGTCATGGAAACATAAATCTTCCTAATTCGGTT
CTTTGAACTAAATGATGATCGCCTTAAGAAATGCTCTGACATCACGCGTTATAGATAAACATCCTAGATA
CCTTCCATGACATGTAGAGTCTTGTTTATTTAAAAACATTATCATCGATGAATATTTTTTGTATTAAAAA
AATTGACCCGGCTCATACATACCACGTGACACTCTAGTATTACCTAAACTCCATGAATGACATCAAGAAA
ACCATGGTATAGAGAGATGACATTAAGAGAGAGAAAAGGTAAGATTAGAGGAGGAAGTTAACATTTAACA
CTCTCCCTAATTTCTACCTTTTATTATAGAATATTTTGATTGTTATTTTTTTTTCTTTTTTGTCTTGAGT
CCATCTAGAGTCACAAAGGATTTTGAACTATACAGTGAAAGTAGCCTTTTTCTTATTATTATATAATTGA
GAGGATTAACGTAAGATAGAACTTTCATTTGCTTCCCTGGAAAAACTTATAGATACCTAAACATTTGACC
AAGCTTGTGTGCGTGCATCTTCTCTATTAAGTTTCAAGATTTCAATCATTCTCCACTTACGTTAGGGTGA
AAATAAGACTTGTATTCTCTCCGAAACCTGTTTGGAAATATAGTTGCGGTTACTTTTTAAAATGCTTTTT
ACTTAAAAAAATATCAATTTTTTTTTAATTTTTAAAAAATTATTTTTGATATCAGCGTATCAAAATGATC
TAAAAATACCAAAAAAAATATTAATTTGAAGCAAAGAAAAAAATTAAAAAATTTTAATTTTTTTCAAAAG
CGCTTTTGAAATACAAAAACAAACAAATAAAACTGCTTCTTCTATTATTATTATTATTATTATTTTATTT
TATTTATATATAAATTCAATATTTGATCCATGGCTTCTCTATCATTATTGCCATCATCGTTTTAATCATT
TTACTTCTATCATGTAATATAGAATACAACTTGTTTTTTTATAAAATATTTTTCCCAACACAAACAAATA
ATAAAAAAAATAAATTCAATAATAAGAAACACATTGTTTACGAAACAAACAAACTGCTAAATATTAATTT
ATGTTTCTTCTATGCATCTATATAGCCTATAATATTAAAAATACGAAAAGTTTTTAGAGCTTTGAGGCTT
GTTTTCATATCTATGAAGTATTTGAGAGTGTGATAGTGATTATAGTTTAAAGTGATTTTTATTTGAAAAT
GTATTAAAATAATGTTTTTTTTTTTAAAATTATTTTTAACATCAACACATGAAAACAATATAAAAATATA
TAAAAAATAATTTTAAATAAATTTTTTTTAAATTTTTAAAAAATATAGTTTTAACCTCATTCTCTAACAT
TTAAAAACACCATTTCTTTCTTAGTGGTGGTGGCATCTGGGTACTACCGTTTAGTTAAAGCATCATCCAT
TTGAATCCATCCAGTTCACTCATCAAGAGCCAATACGGCCTCTATATAAAACTCTTTCCCCATAATGAAC
ATTCTATTGCAAGCACCAATACGGCCTCGTTTTGGTGGCTTAAAATCAAGTGAGAAAAGAGTTGCAGGCT
GTTTTATGACAAGATTGAAGGATGCAAGAACTAGTTTGGCCCACTTACAAGAAATGAAAGGTTGAGGCCC
AAAGATTGGAAACCAGTTGGAGCCAGATGCTGCAGAGGCTCTCTACTACGCACAGTACTCATGCAAGTTT
TGGAAAATGGAATGGTAGAGATTTGGAGACACCAACACCAAGCAGAACCACAGCCATACATTCAATGAGA
GGCTATCCATAATCTAATCCTCTCTTATTTTTTTCTCGCCTGTCATCTCCCAAGCCACCATCCTCTACTT
CTAGTGCTGCTAAACCAACACTAGAACTACTGCTATTTGAAAGAAAATTCCTGCTTTTGTCAGCCTGTTT
TGTTTCCATAATACCATT
Sequence ID: 49
Sequence Length: 3000
Sequence Type: DNA
Organism: Poplar sp.
GAGTCAAAATCAAACCATCACCTGCTCCTGCACTTCAATTTCTTCTTCATCATCTTCTTCTTTTGGAGCT
TCAAGAGAAACATCAACAACAATGGCTGCTGCTACTGCTATTCTTTGGAATCCTTTAATTCTAACCAGAA
ATCCTCAAGGACTCCACCTATCTCCAGGTTTGTAGTCTTCATTTTTCGCTTACTTCAATTCAATTTTCTG
TATAATTAGGTTTATTCGAGGTGGCTAGATATTCCCATGGCTTCCTTTGTTTGGCACACAGCATTTGTAA
ATGAAATATTGATTATATTATTTATTTATCTCTGTTAGCGTTGTCTTCTTCTTCTTCTATAAAGCCGTTG
GACAAACGCGCCTTGAGTGGTGGTCCTGGAAAACTGCGAATAACTAACTCCATAACCAGAAGCTCACTCA
CAGTCCAAGCTGCTGCTAATGCTGCTTATAGGTACCGTACAATTGCTTTGATGGAAATAGAAGAATTACT
ATAAATTTAGCTGAGAATTGCTTGTTTGCCTGTGTTTTCACAGTGATGGAGGAAGAAGGCCAAGCAATGC
AAGCATTTTTGTTGGTGGCTTTGTTTTGGGAGGACTTATAGTTGGTGCTCTTGGATGTGTATATGCTCCT
CAGGTCTTGTTAATTTTTTCCATATTTTTCTTATCTCTTTCAACTAAGCGGTGTGTGCTTCTTATAGCAT
AGTTGAAGAGAATTTTACAAGTCATTTTGCAAGTGAATCTTGTTTCTTATGCTTCTGTATAGATCAGCAA
GGCATTAGCTGGCACTGACCGGAAGGATCTTATGAGGAAGCTGCCCAAATTCATCTATGATGAAGAAAAA
GCTCTGGAGGTGTGCTTTAGTTCTTGATTCTCTCTGTTCGTAATCAATTTTTGGCATTTTAACACTTTAG
ATTCAACCTTGCCTTGTGATTTTTCGGTTCTTTTATGTCGCTTTTTGCTATCCCCGTTTCTTTATTCATT
AATGATCTTTGGGATCCGGACTCACTTCCTATTTACCTTTCAAGTCGTTGCTACTCTATGAAAGTATTTG
TTGATCGTTGTCCCGGAAAATTTACTTTTCAGCTCATTGCTGCCATGTCATAGCATTTGCTGATCATTGT
CCCAAAATAGTTATGAAGATTAGATTCCTTAGGAGTTTGATTATTTTTGCTTTTGTCTCTGGTTTGACAT
ACAATGCGTAATTGATTCCTTGGCACCATCACATTGAGTGCGTTGCGTGCCTGACATTTTATGATCAGCA
TAATGACAGACAGTGTTTGTAATTTCTTGATTTCCAGAAAACTCGAAAAATATTAGCTGAGAAGATTGAA
CAACTGAACTCGGCCATTGATGATGTTTCCTCTCAACTCCGATCAGAAGATGCCCCAAATGGAGCAAGTG
TGCATTCTGATGACATTGAAGCTGCCATATGAGCTACCTCTGTCTACGCGACAGTCTACCTGGTCTCCAC
TACCAGTAATTTCCATACTGATAATTAATAGCAGTTGAGCTGATCTTTCTTTGTTCTCTTCTTTTCAATG
AACAGTTCCACTGTGACGGCGCCTGGTGTGGGTACATGTAATTTTGCGTGATCGGTTCTGTTAGATTACG
CTGATCAAGTATTGTACTCGAGTTATATACAGTAACATTCCAGCTTTTTTATTTCGTTATATGAGGAGCT
GTTTTTTTCACTACAGTTGTGCTGCTATAACTAGAACTCTCCAATGTTATGTGCCCAGGGGTCACACTGG
ATTCTATAGCCTATCCTTGAGCCAAATTCCTCATGTCCTGGGAATTTTTTTTTTCAAAAATGCTTGATAG
TTAACATGTTCTTCGGGGAGGTTATATTCAGTACTTTAGAAAAATTTGGGCACTCTTTGTATGATACGAA
ACCTGCGTGATTTGATTTCAGACTGTGAGTCAGTCATGTTGCTAAATTTGTGGAGTGATCAAGCAACCAA
CATATGGATTGCTTGACAGCATATGAAGCAGGGAAAATAATCTGCACTATGCGGTGCCTTCTTCAGTCCC
CTCCTCCTGTCAAGGACTGGCGTTGCCATTTTTGCTAGGCAGGTCTCCCATAATACTAAATGATATGAGC
TGTTTACTCTCCGAAGACCTGGGCTCTATGCTACTAATGATTGCTACATCAAGTCAAATGATTTGTTTCC
TTTCATATTGTTTTTCTGAAAATATTGCATAGACTAATCCCTGCCTCAGAAAACTCCTAAATAGGAACCT
CTATTTGAGACGTCCATGCAGTTGTTCTTCCTTTCTGACCTTAATCCACATAGATATTTTATATTTCCCA
GTGTTCTCCACCATGCAGAGTGACTTTCCCTGTTAACCAGAAAAATTCCCAGGAAAGATCTACTGGATGG
GAGCCTGAATGGGGGCCATTTCTACTCATCATGTGGCCCACGAGGTACACAGCATTTCTCACTCAGCAAA
TTAGTGGCTATCAAGCAGTTGTATTAAACCCAGTCTGGGTCAATTCAGGATCTATTTGACTCGAAACCTT
TCTAAACCAGTTTTGAAACCAGATTATATGACGTGTTTAATATTTTTAAACCTTGATTAATCGGTCTTTA
ATTATTATTTTTTAAAACCAAGTCATTTCAACTTTTTATTTTAAATATCGAAAGGATATAGTTTTAGCTA
ACTTATAACCCAAGTTTTGGACTGCATGAATCACATGACGGGTTTAATACCTTTGCAATTAAAGGGTCTG
ATTTTACAACTGTGAAGAGAGCAGCCAAGGAAATACAAAAGGGTGCACAATCTGTGGTCGAGACTCTCAC
ATTACAAGCTCAATTATCATCTTATCCCATACATCCTCATGCACCATTCTCACCACTCGTTCTTTCAACT
AAGTTGCGGCCATAATTTTTTTAAAAAAAATTGGAAAAAATATCAAGGAATTGTAAAATGAGAATAACTG
ATAAAACGAGTTGAACTATATATAGCCAAGAAGTGGCTCTCTTTAGCTTTAGTTGCAGCC
Sequence ID: 50
Sequence Length: 3053
Sequence Type: DNA
Organism: Poplar sp.
GTACTCTATTGAAGAAGTCTCCAATTCCCAAGCCTTCCATTTCTTCATCTGTTCAACAACCCCAGTCAAC
AAATTCTTCAGAGACGTCTACCATGAATGAATTCTAGATGCATTGCTAGAATTTTATGAACTATAGCTTA
CACACATAATATTATTAAATTCAGTTTAATTCAGCATATTAGTCGATTAGAAAATCTTACCTGAATTAAA
TTTTAAATTAAACAGGTAAGAGTTGACTTAATCAAATATGGTTAATTAAATAAATGAATTTTTGATCCAA
TCAAAATTTAGTATGATTATATTTTAAAAAAAGATATTATTTTAATTATTTAAATAAATAATAGTACGAA
GCCTAGCTGAGTAGCATTGTGTTGTGTATGTATATATAAATGCATAGAGAGAGCTAATTATGGAATTGAA
GCTTACTTTTGCTTGCCCCAGTGCCATAGTAACGACACTGTAAAGAACATGAAAAATGGCAAGAACAAAT
AGAAATATGTGCAATTGGTGCACTCCTGTTTGCGAAATCAATGAAACTTTACCCTGCAACCAAATAAAGA
GAAATAAGGGATTAATTTATCATATTTCCACCTTCTCCATATTCGTTAATTCTTATCGATTACAAGAAGT
TAGCTTTGTTAATTAATCACCTTGGAGCAATAGCCGCCCGCCGCCAGCTGCCGCTAAAACTCTGTGGATT
GCTACATTTCCGGCAAATGAAAATAGTTTCCTCTTATGATCACCTCCATCATTGCCGTCACCTCCTTTAC
CACCATTTTTATCTTTATAGTTGTCCCCAACGTAATCATATTTGCAGGGAAGCATGACGTTTTCGTATTT
CTCAGGGATGCATATCTTTAAGATGGCGCTTGTACCCACAGTAATTAGCAACGATATGAAGCCCAGTAGC
ATTAATTCTGTAGTGACAAACATACTCGTCAAATTAAACTAAAGAACCCAGCAAGGTGTAATTTTTAATA
ATTATAGACGCAGCTAAGCACTCGTCACCAAAAATGTTGTTTCTAGCAGCGATTAAAAAGACTTGCCAGC
TTTAATTTTCTCCAAAGCTTCACTCATGGCCTTCTTTTGGCGTTTTTGAAACCACTGTAGTGTGCATCAA
AGCACAGGGGAAGTGAGAACAAATTAAAATATAGAGCTGAGCACAGATTTTAAGCCGATGTAAGAATCAC
TCACCTTTCCTAACGACTGAATCCCATGTTCTATGAGAACAGATAAGACCACAAACACTGCACAAACTGC
CGCTACAGCCCATGTAGGTGTGTTTTGCAAGGTCTTGTCTCCATAAGAACCAGCTGCCATGGTTGCTAGC
CAAATTGCACTCCGTTCAAACTTCAAGCACTTGGTAGGAAAATGGGCAAACTAGAAATATTTCTCGGCCA
AATTTATGGAACTGATGACCAATCATGGAAATGGAAGGCGCGCAATGGTCGTAGATTTATGCTTAAGATT
TGCCAACAACAACGCGGTTTTAATGTGTAATGAAATTTGTCATTACCTTTTGTTGTTATTACATGAGGCT
GGGAATATTAGCTTTGTCATCTGAAATTCCGTCACTTGGGACCCCTTGACATGAGCCGGCTGAGTCAAAA
ATCATTAATGGGATGGATCGAACCATTGTCATGGCTCTACATTAATGAAATAACCTTCAAAGTTTTGCAT
ATAAAAAAATTACTATAAAAATTGGCTTCTTGCATACAGTATTTTTCATCAATCTCTGGAGACTTGATGC
ATCATATGTGGTTAGAGAATGCGTTGAAAGAGTCAAGAAACTAGGCAGAGGTTACCATTTCAAACAAACC
CACTAAACTAATATCTGTCGTTTTGTGATTTTAATTGTTCAAGATTCGATATAGTTTATCGAATTTATGC
TTTCCTGTACTACGCAATATTGCTAGTGATGTTCTTCCTTGATGTAGTTGCTTGAAATAGGATTCATGCC
GTGTGTCGGAGGATGACATGTGAAGAGAAAGAGTATAGTTGTTAGACATGATTCGTAGATTAGAAGTCTT
GAATTAACGGGATCATCAGGTGAATTTGGGTTAATCATGTATAATATCAAAATAATGTCGGTTTTTTTTT
TCTTAGTGTTAGTCAATCAGGTCACGAAAAACTTTACCGGTCTAAATTTCTTATTCGGTGCAACTAGAAA
CCTATTTCGAGTTAAGCTATAGTTTCTGAATTTTCAAGTTTACCAACTATAAGAAAGAGATATTTGAGCA
ATCTGCGCCCCTGCTGTGCCGTCCGCACATGCTGGCATTGCCATTTGTTTTGATAGTTCTCCCACAATAC
AAAATGATGTGTTCTGTTTACTTCCAGGAGGTCAGGGCTCTATGCCACTAATTAACGAGTGCTTCATATA
GTCACAAATGATTTGGGAGGTGGAAGTGGCCGACGGATTGTTTCTTCTTGTTGTAGTTTTCCTTTTCTTG
TATTTTTTTTTCCTGAAAATTTTGCATGGACTAATTCCTTCCTCGGAAAACTACCAAATGCGATTCTTTA
TTCGAGACATTGATGCACATGTTCTTCCTTCCTGACCTGAATATTTGACATGGATATTTTGTATTTTCCA
GTGATCTCCACCATGTACAATGGCTTTCCCTGTTAGCCAGAAAAATAAAGAGGAGAAATCTACTGACTGT
GGGCCGTTTCTCCACTTCATGTGGGCCACGAGGTACAAAAACTACGTATCTCACTCAACAAATTAGTGGC
AGTTAAGGGGCCGATGATTTTAGAGCCGTGAAGAGGGCGTTCGGGAAAATACAAAAGGGTGCACAATCTG
TGGTTCAGATTCTCATATTACAAGCTCAAACATCATCTTATCCCATACATTCCCATGCACAATTCTTACC
ACCACACGTTCTTTTAACTTAGTTGCAACCATACTTTAAAAGATTTGGAAAATTATGAAGGAAATGTAAA
ATGAGAGTGACTAATGAAACGAATTGAACTGTATTTATAGTCAGGAAGGAATTGAACTGTATCCCAGCCA
ATACCAGACTTCCATCCAAGACCAACCACTCTTTCCCTACTCA
Sequence ID: 51
Sequence Length: 3042
Sequence Type: DNA
Organism: Poplar sp.
CTTTATGCATACCAATATTGAATTAAAGGGGCGAGAGTGAATTAAAGTCGCTCAACATCCACTTTCAAAT
AATTGCTGATATTTACCTAATTATACCAGTTCAAAGAAAAAAATATATACAATACTGAGATATAGAATTT
CAATTAATCAAATAGGAAATGATTTAAGTATTTTAACACAATTTCAAAAATATTTTTTAAAAACTATTGC
TCCTTCCCTCTTTGTGTTTATATTTATCTATTGTGCTTTGTTATTATACTCTATTGTGTTTTTTTAAAAA
ATATTTTATGTTTTAATCAGAGTTTTAAAACCCGGACCGGCTCGGGCGGGTCGACCCGGGACCCGGCCGA
CCCGGGCCTGGGATCGGTCCTGGTGGAGGCAAAAACCAGCTTGGGAATTGGTCCGGAGAAACCCAGTCGA
CCCGGGACCCGGTCCACTTGGTCAACCCGGGTGAGACCGGTCAAATTTTTTTTTATATTGATAGTCATTA
AACGACGTCGTTTTGACATTTTAAAAGGCCAAAACGCTGAAGAGTGAAGAAAAACAAAGCAATATCAGTT
ACAATTTATAAACCTAATTAACTCAACTATTTGAAACCTAGCTGAGGAGCAGATGAGCAAAGGACGTCTT
GACTATTGATCGCTGTTGTTTCTCTGCGAAAAAGGTTTGAATCTCCTTCTTTTACTATTTGTTTTTTTTT
ATTCTTGGCCGTTGAAACAATTTGTTTTCAAATATGGAATTAAGCACAATAATAGCAAAACACCATCAGT
TAGTCGCCCCCTTCCCCTCTCAGTCTATCGAACAGCTGAACTGCGTGCCTTGTCTCTTTCTGATTTAACA
ATGGAGGAGACCGACGCTTCTGCTCTCGGCGAGAAAACCATAAGCAAAAACTTAGTCTCTCTCTCATTTG
TTCTTACTGGAAATTTTGTTTTCTATTTTTTTTTAGTGATGGATTTAATTGTGACTTTTGGGTATGTTGC
TACTCTTGTAGTGCACTAAAGAAGGAATAAAGAATAAGAAGAAAGAAGAAGAGAGACGCCAAAAAGAGGT
GTTTTTTTATAGGTTTTTTTTTAGTTGACCCGGATCAACCCATCTGACCCGTGACCAGATCACTTGACCG
GATCAATAACTGGATTGGGTTTCAAAACTATGGTTTTAATATTTTAAAACAGGAAAAGAAACAAACTGGC
CCAGACTGGCTGACGTGGCTTTCGAGGACCTGGCCAGGGTTTCTCAGCTCCGAAAGTACACGACAAACTC
GCCTCCGTGTTTCACACAGTTGCAATCCCCTAATGATAGTTGTTCTAGCACTGTCTCCGTACAAACAATT
TCACGGAATTTGTGTGGAGCTCTGTTTTTTCTAGTTTTACATGTCTATTGTAAAGAATACCAAGGGCAAT
AAGCAACCATGACTGATAATAAATTTCTAGTTGGATAAATATGCTCTTCGAATATCTTATTTTTTTTTAT
TAAAAAAATGAATAAATAAAATAAACACTCGCCATAGTCATACTTATGCTCTTTAATTTTTTAGTATATA
TCTAAATTATTTTTTACTTGAAAATATATTAAAATAATAATTTTTTATTTTTTACAATTTAATTTTGACA
TCAATACATAAAAATAATAAAATAATTATTTTAAAAAATATCAAAAATACATTTTAAATAAGTTTCACTT
AAAAACCTTTGACCCACTTTTTTTGCCATTTAACCAACCGAATATAAAATCAGGAGAACAAGAGAGCTCA
CACCAGAAACAATGTGCCTGCTCGTACATTAACACAACTCACCCGCTGATAGTTTGCTTTTTTGGAGAGA
GAGAGAGAGATACACAAAAAATAAAAAAGTGAGCTAAGGACGTCCCTCATAAGAAACTCCGCTAAAAATT
TCCTTCTCTTTCTGTTAAATACACTTTCGATTTTGCTTTTAAAATACGATCAAACGCCACCAACAACTAC
CATTTCTTTTTTTTGGTTCTTTCATTTTCCTCGCCTTCTGCTCCCTCTCAAAAGCCGCAAACCAAGCCTT
GGTTTAGTAGTAGGGTTCTTGAGAGAAAGAGCTTGGTGTTGCACTCAGTACAAATGGCTTTCTCTTGTCT
TCTCAGATCTACGCCCGCCGCTCCTCTTGTTGAAGCTTCCCGCTCCGACTTCTCTCCTTCACCGTCCGAT
CGATTCAAGGTATCTGCTCCTTTTTCTCCTATCAACTCTTTCTTTTTGAAAGTCCGTTAGTCGCACTTTG
TTTGAGCTTGATTTTGGTTTTTGGTTGTTGAGAGAGAAAAAAAAGTAGAGTTAAAACTAGATATTGAAAT
TGTTATTCATGAAAAAATAAAATAAATATGGAAGTTGCCTGACTTGGAAGTTAAATCTGCAAATAACGAG
AGATATGAAAGATATAAGATAGATAGTAGTGTATACAGGTTATTTATTTATTTATTTGATTTCAGTTATA
CTGGTTTTGAGTTACTTATATCTGTTTGGTTGGCGAGAAAACTGAGGAAAATGAAACAGAAGCTTGTTTT
AAAACAAACTGTTCAAAAAAAAAAAAGGTGATATCAGATCGGTATTATCATCAATTATTATTAAACCCTG
TGCTTCTTTAGCTTATAGCTCTTATATTTTGAGTTTATTTAGTTTTAATAATTTCTAATCGTTATAAAGA
ATGCATTAATGTTCATATATAGACTAAGCTTTTGACAATGTGTCTGTCTATAGCTGATGAGTGGTGTGAA
GTGCCAGTTACTATTTAGAGATGTATGTAACTTTTGGCCATTTTTAGTTTTAATCTTTCCTTTTCTCCTT
GTAATCTCAGGTGTCTAGCGTTAGTTTTAACTCTTTGAAGAGCATTTTTGGCACTTCAATTCCAACAGGG
TCATCTTCCTCACAGTTGAGTACTGAAGAATTTGATATTAAAATCTCCACATATATATATAGGTACATGT
GCGCCAGCATGCCTTTTCTTTAAACTAATTCTGAAACATTTTGAACTACTCAGGACATGCAGTGGAAGGA
GCATCCAACCCATCAAGGCCACAGCTACCGAA
Sequence ID: 52
Sequence Length: 3099
Sequence Type: DNA
Organism: Poplar sp.
CTGTTAAGAGGAATGAAGAAGCGTGTGGCTGCAACAAATGAATTGGTCCCTCTGATGGCTCAAAGCCAAA
GACTCTCTTTGAAAGATGCCTCCACATTCTTCATCAAAATTGATTCAGAGGAGCAGCAAGGAAAATAAAT
GGCTTGAGCTTCGCCAAATCATAATTTTTTCACTGAGACTTATCAAACTTAATCAATCCCCTTGCTAGGG
ACGTTGGTTTCGGAACACTTTATTCTCGTAATCAACGACCATAATTTGTCTGGCCTTTTGAATATTTTAA
CTTTTGTTTCGGCCAAGGGCTTGGCCTCTGAATATTCATTTATTTTGGATCATGAACCTAACTTCTATAA
TTTTACCAGCATTTCTTCTGAACAATTGTCATGTTTTAGTAGACTTTGGTGAGCAATTCACCTTGAATCA
ACTGTAAGTTCTGATGGAATAACAATCTCGACACAAATGGGCTAAACTTAGCACAAGTTATTCGTGAAGT
TCTACATATCCAGTGCTTCTCCCGGATGTTCATGTCAAAGCCCTCGGGCGATTCTCGATCATCCTCTTGA
AAATATTTATAATTATTTTATTACCGGCCGGCCTCTGCTTGGTCGGTCGCTTGTGCATAGTAAGGTATTG
AAGTGTTCCATTCTACTATGCGTATGTTCGCAACAAATTCTTTTAACTCTTTTGTCCGCGAAAACTAACC
CTTAACGAGAGAGTGGTTTGTGGTATTCCAAATCCATCGACAATATTTTTCTTAATAAAATTTATTTGCT
TTAACCAATTTAGTAAATAATCACATAATAAAAGTATATCGTTTTCAGGAAGGACGATAATTTGTTTCAA
TCGATGACCCAACTTTTAAAAGATTATATTTTATTTACAGTATGATTAGAAGTGTTGTTATAATTATTTT
TTAAAATATTTTTTATTCAGAAATGTATTAAAATAATATTTTTTTATTTTTAAAAATTATTTTTTATATC
AGTACATCAAAATAATATAAAAATACAAAAAAATATTAATTTGAAAAAAAATATATTTTATTTTATTTTT
TAAAAAATATTTTACAAATTTAAAAACAAACAGAATAGTACCATAAGTTATTTACTCCTCGGTTATTATT
TTTTTTCTTAATTGCCGAGTATGCCCCCGAATATGTAAAATAGTTTTTTTCTTTTCTTTTTGAAATGCTA
TCCATGGTATTGATTGAAATAAAGATACTCCTCAAATACACCGACGCCCGACACGGCATCAGATATTAAT
ATAACTCAATTTTTGTTTTTCAAGTAATTAAATAATATATTCATTGATTGTACATTAAAGAAATCGAAGC
AATTGCTAATAGAACTATAGGGAAGAAAACACAGCAAGAGTGGAGGAGCAAAGCCGCCCCGGTGGGCCCA
GAAGAAAAATACAAAAAGGCCCCAGACTGGCTGACGTGGCCTTCGAGGACTTGGCCAGGGTTTCTCAGCT
CCGAAACTACATGACAGACTCACCTACGTGATTCACCGTATTTTTTTTTATTAAAAAGATGTTCATATAA
ATTATGGATATTTCAACTAATTTCATGAATTTAAAAATTAAAAATTATATAATTTTTTAGTTGCTATTAT
ATTAACAATCACGTGATCCAAACCTGAAATCACAATGAAAATAAACCTCTTGATCCCAAACTGGTCCGGA
CACCTATATTATTTTGAATATTTTTGCAATTATTCAAGGAAATATTTTCAAATCATTAATTGTTTCAACA
TTAACAAGAATATATATATTTTCTTATGGTTTTTTACTTTTTTAAATATAGATTTATTCAACGCCTTATA
TATTGAATGAGTAAAGAAATTAGACATAATAATTGTACCTTTACCAATGTTTATTGTATGTACATTAAGA
TAAAATAAGAAGTTATTTTTTTTAATCTAATTTGCTCACTAAACGCACCATGACGACTCTACAAAATTAA
TTTTAAAATACAACTTGGCCATCAAGTCAAATATATTTTGAAAATAAAAATGTAATATAAATAAATTTCA
CTAAAAAACCCACATATTATAAGGGAAAAAAAAAATACAAAGAGAGCTCACGCCAGAAACAATATGTCTA
CTCCCATGTTATCATAACTCACACGCGGTTTATTGCATGGAGAGAGAGAGAAATTCAGAGAAAAATACGG
TATTTTAGAATTAATAACACATGTTAGAAAAACATTAAAAAATATTATAATTTAAAAAAATATTATAGTT
TAAAATATTTAATGATCAAGAAATGAGATTTAATATTCAATAATAATAATAAAAAAGTTATCAAGGATAC
ATCGAAGCTCTGTTCTTTATTTATTCAGTGTTGTTTGAAAGATCTTGACAAGATAAATCTAACCACATCT
TAAAAGATGATCAAATATAGTCATAATTTGTTAAAAATTTTATTCGAGGTTAATTCAAGATTAATTATAA
TATTCTCTGGTGTTCTTCCAATATATAACTAGAATTGTTTCGTCGAGATATTTTTAAAAGTAACGAGTGT
GTTAAAACCAAAGTTTGTAGTAACATATTTTTTTTTCTTCTTCCATTTATTTCTCCTACAATATCACATC
ATTTCATTTTTTTCTTGATTATTGGATTTTTAATCTTATATTTTGTTTATTGAAACTTCTTTGATTGACT
TTTGCTAAATAATATGTAAAAGAAAAATATTTTGAAATATCCACTAAATATATTTTGAGATGCAATGTTA
TTTCAAATAGTAATTCTCTATAAAAATAATATTTTAAAATATAGTTGTTTTTAAATTCTCCTATTTTTTA
AGTATTTTTTATTTTTTTTCAAAACTTTTAATATACTATGCTATTTAAAAAGAAAAGATTAAAAAAATCG
GTACAGGAAAAAGCGAGCCAAGCACATTCCTCGTGAGAAACTCCGCTTAAAGTTTCCGCTTGTTTTATTA
AAAAAAAATACACATTCGTTTTGTTTTTAAAACACCATCAAACACCACCTGCCTGCAACTACCATTTCTT
TTTCGATTTTTCATTTTCCTCTCCCTCTCAAAAGCCGCAAACCCAACCTTTGCCTTATCAGTAGGGTTTT
TGTGTTGCTCTTAGTACAG
Sequence ID: 53
Sequence Length: 3035
Sequence Type: DNA
Organism: Poplar sp.
AGATCCTCAGAATCCAACTCCTGTTACAATTCAGGCATTTCCTACACATTACTTGCTCATGGTTTGAGTC
GTTGTCATTCTTTGGTTTGAGTCGTTGTCATTCTTGGCTCCTCATCTGTCTAGTCAATTGTTTGGGGTAC
TTTAGCATATAGAGACCTTAGAGAGGCATCATTTGCTCCATGGTTTTGTGGGGACAAAAAACAAAGAACA
CTGCTTGCACTCAGGATTTAGGTTGCCTATTGACAAAGGGTTCTTCCTAAGTAAATTCTTGATTTCTCGT
AAATGTCTTTTTCTTCGTAGGGATGACTTGCAACGCTTACTCAAGTAGATTTGTAATTTTCGCTACCTCT
CTTCTTAAATTGTCAATTTTTCTCTGAGGATTCATTTCTAACTGGGCCCTTTTTTCGTGTTTCACTTGCT
TTTCTCTGAGGATTCATTTCTAACTGGGCCCTTTTTTCGTGTTTCATTTGCTTCTCTCTGAGTCTTGTAT
TGTAGAGTCTGAGAGGGAATTGGATTCAGGAGGGACATTTATTCTACATTCTACTACTGGAGCAATTTGC
AAAGAAAATAAGCAAGAGATGCAAGAATGCATGATGATGGGTGCTAAAATGATTGTATTGGATATGGATT
TTGTCTGATTCTGCCATGGTATACGGAACCGAGATCTGGTAAACTGCCTTGTAGATCCGTATAAAATTGA
ACCTTTAACGTGTATTAATCCATCCATTTTGAGAACAAAATTAAAGATTTTCATTCAATTAAAATGTGGG
AAATAGCTTAACACATTATCCATACATTTTATGAAGTTGGTTTAAGACTCCCTTCATCCGAAATATGGAA
TATCATTTCAAGCCTTAACCCATATCACTTGAGAAGAAAACTTTAAAATTCTATTCATTTGAAAATTAGG
TAATTTACATATTCTCCAACATCAAACCATTAAAATTTAATCCATCCATTTTGAGAATAAAAATTCAAAA
TTTCCATTCAATAAAAAATGTGGGAAATGTGTTGACGTATTATCCTTGCATTATGGGCAAGTAGTTTAGA
AATTTCATTCATCTGAAAATATAAAAATAGCTTAATGCATTAACTCGTAGATATCAAAAATAAAATTTCA
AGATTTTCATTCAACCAAAAATAAGAAAATATATGCAAAATGATCTATTAATTCATCATATAAATTAACT
CTCTGTTTCATGAGTATGAGTGTAAATTGTGGAATGTTCTTAAATAGATCTTGATTATCTTGTTATCTAT
CTCATGAAATTTCATACACGTCGAGCTTGTCCAATAATATTATAAGGAGACACCTTAGAGGAAGGTTCTA
ACCATTACATGTAGATAGGTTAGGTACTAACCATGACCTTGTAGACTTTCAATAAAAATCGAGGTTTCAT
GAGTTCTAGTCCACAATGAAACCCAGTAGGACACCGGTAATTTTTTTATTGCTAGCTTAAGGCAATATGC
GTGCAAAAAAAATAGATGTAGTAGGAGCAAGGGCATAAATTCATATCTAGACGAAGCAAACATGAAATGC
ATTCAAAACAAAATAATTGTATGAAAAAATCAAAAATCAAATTAAACAATTTAGAAAAAAAAACAAGTAA
ATATTCAGCATATAAAGCACAAAACATACATTATAATGGAATCAAACAAACAAAGTTTATTCCTTAAAGT
TTCTAGTAGAGTTATCATAATGGCATAGAGGACATCTTAGTAAAGTAAAGTAGAGGTAAAATAGAAAATA
AGGATATCATAGTGTCACGCAGAGTTTTAAAACCCGGACCGGTCCGGTGGGTCGACCCGGGACCCGGCCG
ACCCGGGCATGGGACCGGTCCGGGTGGAGGCAAAAACCCGCTTGGGAGTTGGCCCGGTGAAACCCGGTCG
ACCCGGAGGGTCGACCCGGGACCCGGGCCACCCGGTCAAACCCGCCTAAGACCCGGTCTCTTTTTTTTAT
ACTTAATAGACGTTAATCGACGTCGTTTTGGGCTTGATTTTGCGCCACTGCTATTTTCGATGATAAAGCT
GCAAATTTGACACAAAAACAAGAGAATCACAAAAGGGTTGTTCTTAGTTTCTTGAAAAAGTGGATAAACA
AGTGGGTTTCTGTCAATTACCTTGTGATATTGTAAAAAGCGAAGTGTACAACAAGAAGAAGATAGTGGAG
AGAGGAAGCTTAGAGAGTGCCATAACTGAGGAAGAACTTACGTTTCACCACTTCATCTCCTGGTTCTGGT
TCAGCTAAAGATTCTTGCATTATCTTGTAGGGTCTTGTGGTTCTCTTTTAAGTGAATCTTTTAGGTAGGT
TCTGGTTGTTTTTGGAGTTTGCTTGCTGGCCTCAAGAACGAAGAAAGAATTTCAAAGAACTCCACTTCTG
ACAAGAGTGAATGATATTGCTGGCCAAATCTTAATAATAGCCCCCCAACTATGTAGCTAATAACAATTTA
ACAAAAGGGGGAAGGACTGGAACAAGAGGAGGAGCCTTAGGCCCTTATGGTAACTTCACCTAGGGTGACG
TGGCGAGTTCTGGCTGGCATTTTCAGTGAGAGAGACGTTAGAGAACTAGCCCACCAGACAGCACCATCTG
TCTTTTTTTTATAGGTTTTTTTTGGGTTGACCCGGGTTAACCCGGGTCAACCCATCTGACCCGTGACCCG
ATCACTTGACCGAATCAATAACCGAATCGGGTTTCAAAACTATGGTGTCACGGAGTCTGTCATTATGTCA
AATATTCTCTTCCTTCCAAGCTTACTAATTTTTGCATTTTCAAAAAAAAAATCTTGTTTTTGGAGTCCTT
AACCAATTCTAAACCGCTGGTTATCGAAATCAACGGTGCATGATCCCTCCAATTTTAGGAAATTACGTGG
TCATCACGTAATCACCGCCTCGACAAGTCCGCTCAACCTAACCGTTTCTTCTTAAGATCGCAAGAATCGC
TCCTTAATTCCGTTGTATAATATTTATATATAAAGAAGAGCAAGCACCTCACTCACCATCACACTACACT
TCATTTCTTCATCATCATCATCATA
Sequence ID: 54
Sequence Length: 3090
Sequence Type: DNA
Organism: Poplar sp.
TTTCCTCTTCTTTTTTTTCATTTTTTCATTTTTTTCCAACTTTTCCTTTATTTTTTTGTTTATTTTTTTT
TTTCAAAATTACTTTTCTTTTTTTTCCAACATTCCTCTTTTTCTTTTTTTTTATTTATTTTTTTTCAAAA
TTATCTTTGTTGATTTTACTTTTTAAATGTTGAGCTGGTTAAAAATTTTGCTTTGTAATTTTTTTCCTTT
AAAATACTATAGATTGTTACGGTGTTTTCGCACATAGTTTTTCTATTTTATTTTTTTATTTTTTAAAATT
ATATTTGTCGATTATTTTTTATATTGAGCTGACTGAAAATTTAGTTTTGTAATTTTTTCCTTTAAAACAT
TGTTGATTGTTACAATGTTTCTCTGCGTGGTTTTTTTTATTTTTGTTTTTTTATGATTTTCTTCGAAATT
ATCTTTTTTTATTTTATTTTTTAATATTGAGCTGGTTAAAAATTACAGTTACAATATGTGAGGAAAGCAC
TGTAACTTTCCTCGCAAATTACTGTGGATTGCTACAGTGTTTTTTCTCATATGGTTTTTTTTTCTGTTTT
GTTATGTTTTTTTCTAAAATTATCTTTGTCAATTTTATTTTTTAAATATTAAGCTGGTTAAGAATTGCAA
TTACAAGTAAATACAAGTTTTCCTCACAAAACACTATGGATTGATACAGTTTTTCCTCACATGATTTTTT
TCCAGTTTCTTTTGTGTTTTCTTTTTTTGTAATATTTTTTTCTAAAATTTTCTTCGTCAATTTTATTTTT
TTTAATATTGAGTTGGTTAGAATTTAACTTTGTAATAAAACTTAATTATGTAGGGAAAGCACTATAGTTT
TCCTCGCAAAACATTGTTGAGAATTACAATTATAAGTCATTACAAACAAGGCTAAATCATGTGGGAAAGC
ACTGTAGCTTTCATTACAAAACACTGTGAATTGCTAGAGTGTTTTCAACATGATTTTCCTTTTTTTTGCT
ATTTTTTTTTAAATTGCCTCTGTTGATTTGATTTTTTCAATATTGGGCTGATTAAAAATTTAGCTTTGTA
ATTTTTTTTTCTTTAAAACACTGTGAATTGTTGTAGTGTTTTCCCATATGATTTTTTATGATTTTTTTCA
AAATTATCTTTGTCGATTTTTGTTTAATATTGAGTTGGTTAAGAATTATAATTATAATGAAGCTAAATCA
TATGGGAAAAGCGTTGCAGATTTTCTCACAAAACACTATGAATTGCTACAGTATTTCTCTAAATGGTTTT
TTATTTTATTTTATCGGGGAAAGCATTGTAGTTTTCCTCACAAAACATTATCAATTGCTACAGTGTTTTT
TTTCATAGGTATTTTCATTCCAAAATTATCTTTGTTGATTTTTTTTTAATATTAAGTTGGTAAAGAATTT
AGCTTTATAATTCTTTTTGCTTTTTATTAACAGAAAATCTAAATCATGTGGTGAAAACACTGTGTCTTTC
CTCCCAAAACACTGTGAATTGCTACAGATCATTTTGTTAAGTCTCTAAGTTTTTTATCACCAATATAACT
TTTTTTCCATCATAAAATATTAATTCTATCATACTTTTAATTTTTATTATTTATCTAATACTGATACATA
ATTATAACATTATTAATACTTGTGTTTATAAATTCATGGCAACATGCGCGCATGCCATCTCATGATAATA
AAATACAGGAGTTCTTAAGGTACATTGGTTTTGCCACTTGCATGACGTTGGGTTTCTGCTCAGAACGCTG
GCTGACCTGTTGCCAAGAATCTTTGTGAGCATGCCATGGCCCAAATTGAATATAACCCGAGTTATATATA
TATATATATATATATATATGGGTTTGACCAATAAACAATTTCTTCGCAAATGTTTAAAAGAATTATAATT
ATCTCCTTTTAGGATCTCTGTTATGCTAGTTTGAAAATGTAATTGTGATTATTTTTTAAAAAAATTTTAT
TTAAAAATATATTAAAATAATATTTTTTTTTATTTTTTTAAAATTATTTTTGACATCAGCACATCAAAAT
GATTTGAAAACATTAAAAAAATATTAATTTGAAATAAAAAAATAAAAAAATTTTATTTTTTTTTAAAATG
CTTTTAAAATACAAAAACAAATCAAATCTAAACACTAATACTTTCATTAAATTGGTATAAGTCACGGCAA
CTTTCACTCAATAGATCTTTCATGTTTTTATATATAAAAAAATTTAGACACTAATACTAACTTGATTTTA
TAATTAAGTTATTTCTTATATTAATTTCAACTTAAAACTGTTTTAATTCGTCGTCAATGACTTCTGTTAA
AATCATCCAACAAGAATTATTATTATTATTATTATTATTTAAAATAATGTTGTTTCTGTTTTAAAAAGTA
TAATTTTGGTAAAAAAAATATAAAAGTTTTAAAAAATTCACATAAAAGTTCTTAATTATACTCTTTTAAT
TTAAAAGTGAAATTAAAAAAAAATCATTTGACAATAAAATCGAAAGGTGGGTATTTTTGAGATCTACTTT
TCAAGTTTCTAGCAACCGGAAAACCGTGAAACTTGTGTGGCAGCAAATTCAGGCTTGACCTCGCAGGCTG
CTGATGTCAGCAGAGAGCTCATGCAACCAGTCCACGACAAGAACCTTCCGTTGCTGGGCCCAACAACTTT
GAGCCCATCGGACATACTCCGAATATTCCCACTTCCAGAACATTAAGACTCCCACGGTCATTAAGGAAAG
TGCGCTATACCTTCCTCTCACGCCTCTCCCTCATAGATAAACAACCAGTCAACCACCCAAGACTGAATCC
AAATGCCACAAAATCGCGTGAATTTCCTTTTTAAAATCAGCGGCTAATACAAGGGCTTTTCAAAATTCCA
ATCAGCGGCTTAAAACCAAGCTAATTGTTTCTTTCGTTTTGCCCAAGAAAAACAAAACCGCTCACGTGAC
CTAACCCGTCACCACGCACCTACTCTTCTTTATATGACCCTCAATTAGCAGCCACTCTCCTCACTAAAAT
TATCTCTGTTTAAGCTTATCTCTCAAATCTCCCCTCTTAATTCTAAATCTCTCCTCTGTGTCCCGTTACT
ATCAACAACA
Sequence ID: 55
Sequence Length: 3079
Sequence Type: DNA
Organism: Poplar sp.
GAGTTCCAAGAAACAGAGGTCTGTTGCACGGTCTTCCACCGAAGCTGAGTATAGGGCCATTGCTACAACA
GCTGCAGAACTTGCATGGATTCAATCTTTCCTGACAGAACTCCAATTTCCTCTCTCATGCATACCGGTTA
TATATAGTGATAACATTGGTGCTAATTATGTTTGTGGCAACCCAGTGTTTCACTCTCGCATGAAGCATAT
TGCTATTGATTTTCACTTTGTTTGTGACAAAGTGGCTCACGGTTCTCTACGTGTCTCCCATGTCGCTACT
GCTGATAAGCTTGCCGATGCTCTAACAAAGTCTCTGTCCAGACAACGTCTCTCCTTTCTACTGTCCAAGA
TTGGTATCTCCAATGGGAGCTCCATCTTGCGGGGGCGTGTAAAGGATATACACCATCCACTCAATACAAG
TTGACTAGTTCAGCTTGTAAACCGGCAACAATAATTCAAAAGAGTTAATTATCCTTTATCCTTAGCTGAT
GTAACAAACCTTGTAATCTACAGACATGTATTAATTTATAAAAATAACCTAAATTTATTTATAAAGTGTT
TTTTTTAAAAAAAAAATTATATATTTAGATTATTTTTATATATTAATATCAAAAATAAATTTTAAAAAAT
AAAAAATATATTATTTTAATATATTTTCAAGCGAAAAACACTTTGCAAAACACGCTATCACACTATCAAA
CATTATCTTAATTTATAAAAATAACCTAACTTTATTTATAAAAAGAATTATATAATTATAAACTTTTGGC
GATAATTCTGTGAGCATAAAATTTCTTTTGATAAATTAATAAGTTAATAAAAATCACGTCATAAATCACG
GGGAAAAAAGTCATGGAAAGATTTTATGAGTCCAGGTTTGCTAGCTTCCTCTTCAAAATGCGCACGCACA
CACCGTCGATCATACTGCCTCACCGGGCCATGGATCGACCCCAAGCCCGCTTAGGTCCATGACCTTATGG
GCCTTCACCGTACATTGATGTAGAGTGGAAAGAAATCAGGCGGTCCACATATCATCCACCTAGATTCTCG
TGCCCGTCAAAAATTGACGTGGCCCATGATATAGTCCACAAATAGTGACGTGGCCACCAATCACCCCTCA
GCTTTTTCTTAATGGACATAAACAAAAGTCGTTCCCTTGGAAACATGACACCACTCCTGTACCACTTGAC
TTTTTGTTATCGACAACAGCCGCTTTGAAGATCACGTTATCTTCACTCAGATCAACGGCTAAAATTAACC
TCAACGTCTCACTATACCTAACAATCAAATCTAACCGTGTATAAAAACAAGATCAGCATGACCCATTAAA
GACATGGATCTCATGAGAGTTTGACCAAACTCATCCTCCCATTTTTAAATTTGGTCAAATAGATCCACGT
ACTTCATTTGTTTTTTCAATTTGAACCCTTAACGTTAAATTTAAATTCAAATCAATTCTTCTAGCTAAAT
AGTTACTAAAACAATTAAAAGACATGAGATTGATAATAGTGAAAAAGGTTGATATTATTTTAATTGCTTA
GTTAATATATTCATGTCGTAGCTATACTTTTTGCTCAAGATAAGGTCGTGGATTCGATCAATATTAAGAG
ACTAATCTTTTTTATTTATAGATGATTAGGTTAATTCGTTAGTTTAATTTTTTAGTTAACAAATCCGTGT
AATAGCATAATGGTTACCACATGTGATTTAAGGTGAAGTTAAATGTTTGGTCCATGTTATTAGTAAAAAA
AAAAAATTTAATCATATCATTTAATATAATTTATTTATTTATTTTTATCATTATATATTTTTTATCTTTT
ACTCCCCATCATTCTAATATGAGGTTTTTAACTGTTTTTTTTATTTTATATTTTAATATAAGATTTTTAT
TTAATTTTATCTTGTAGTGTTAAGTTGATTTTTTCTTTGAACTTGCTCAATAAATAAGGTTATGATGAAA
AAACTCCCATATAATTTAATTTAAAATTCATATTAATTAAATAGTCAGATTTGAATTTTTCAAGTTTAAA
CTATTATACCAATATCACAACAACACCAAAAAAATTCAATAATATAGATATTATTTTTTTATTTAATTTT
TTTTAATCTAAACCACAACGAGAACATGGTAAATTTAAAAATAGCTTTAATTTGAGGACACAAATTTGTT
AATGAAGGAACCTGTATAGAATGGAATAGATAACATTCTAATACAATGTTTTGCAACTCTTTTATTTCGA
TAAAAAAAAATGGCTAGAGTTTACATATCATATGTACAGTAGCAAAAATTATAACTTATAGTTTACATTA
ATTCATTCTAAGTGATTTATGCTTTAGAATACAATAACACATTGACACATACACTTATATAAAATAAACA
CATAGAAACTTAATTATCAACAAAACTATATTAAGTATGAATAAATCAGACTTAATACCATCAGATTTTG
TTAGAGATAGAAAATATATATCTGAAGCATAGTTTTTAAATCCCAACTTAAGGTCATGGTCACAAGTCTT
GACCGGATCATTCTAAGTCAATTTCCAATATTTTTTATAAATAAAATGATATTATTTTTATTTTAAAAAA
TAAATAATCAATAAGTTGTAATTAAATTTTTGATCAGGCTGGGTTACCTGGTCATCCAGCTTTTTTACCA
AGTCATTCAAGTTTTATTTTTTTTTATTTTTTTTTAAATTCAGCTTTTCAGCCTGATTTTGACCCTGATG
AACTCAAGCTGTGTTCTAAAACTACCATATAAAGTAATATAAAATCTCTTTCAATTTATTCCTGTGCACT
TGGAATGTAAAAGCCTAAAAGGTGGCCAACTCTCCTTGGAGGAACTAATTTAACAAAAAGAAAACATATA
TATTGAGTTTAATAAATCCCAAAACTCAAGGGATCACAACTGAATTTAGTCAACAGTCACCGGCTACTTC
GGGACCTCGGGTACCCGGTTGGCTCTCTTTTTATACTTGCAAGAGAGCCTCGCTCCTATCGCCCACTACC
TCACTTGTATCTCCTCACTGACTCCAACTCTCATACTGTTTCTCAGCGTGTCTCGGCTTCTCTAGAATC
Sequence ID: 56
Sequence Length: 3085
Sequence Type: DNA
Organism: Poplar sp.
AAAAATTATGTAAGTTTCTTAACTTTCCATTCAAATTGCAAACACAAATATAAATATCACGCCCCGTTTG
TTTGCAGGAAAGTTGTTTCCTTTTAGAAAGTGAATTCCGGAAAAGTGAATTTCAGGAAAGTGAATTATTT
TTCGATGTTTGGTAGTATAATTGAAAATAAATTGGAAAACATTTTCCAGTGTTTGGTTATGTTATGAAAA
ATGAGCTGGAAAATAACTTATTAATGTTTTATTTTTTCAAGTTTATTAAAATAATGAGGAACAAATCTTA
CAAATTAAAAAGTTGAATGAGGATGAAATTGAAAAAAAATATAATTTCATAAATTATCTTAAATAAAATA
AATAATAATCAAAATAATAGAGATCAAATCTAAAAAATAAAAAAAATGAAAGATGAAGAAATTAAAATAA
TAATAATTAGCATTTCATAAATTATTTTTTTAAAAAAAGTAACAATCAAAAGAATGAGGACCAAATTTGA
TAGATAAAAAATTTCAATAAAAAAATGATAAGGAAAAAGCAAATAACAATTATAAAAATAAAGACCAAAG
TTAATATAAAAATTAAATTTTAAGAGATGAAATTGAAAAATAAATATTCAAAACAAAATATATATAGCAA
TCAAAAGTCCGAGGACCAAATTTAATATAATCAGCAAATAATATGACATTTCTAAATTTTTCACAACTTC
CGGAAAGTGTTTTCCGTCCAAATTTTTCAGGAAAATACTTTCCTGGAAACCAAGCCAAATTTTCCTTTGA
CTGAAAAGTGTTTTCCGTTGATCAATTTTTCTAATGGCAAACAAACACAAGAAAGTTTGGAAAGTGGTTT
CCCGGAAACCACTTTCTGGAAAACAAACATAGCCTTAATTGGATATATTTCTCTGGGATTTATGCTCAGG
TTTTTTTTTCACTGTTTTTTAATTAAAAAATAATGAAATTTATTTCCTGATGACAAAAAATAACAGGCCG
TGGATCTTTTCTGATTGGGAGTGTGGTTGTGGTTGTTTTTCAAAGTGCTTTTCATTTAGAAATGTATCAA
AATAATATTTTTTATTTTTTTAAAATATTTTTAATATCAGTATGTTAAAATGATTTGAAAATATCAAAAA
TTATTAATTCAAAAAAAATAAAAAAATAATTTTTTTTTTAAAATATTTTTGAAATACAAAATCAAGTGAT
TAAACATAGATACTTGTGCCATCAAAAGTGACGTGGCCACCAATCAGCCCTCAGCTTTTTCTTCACGGAT
ATAAACAACCCTAGGAAATACCACCACTACCATCCTACTTTACTTTTCACAATCGACAACAGACCACTCT
ATAAATATCACGCTATCTTCACACAAATCAAACGGCCACAAATATGCCGCAGCTTCGCACTCTACCCCAC
CATCAAATCAAACCGTCTATTAAACAAGATCAGCATGACACATTAAATAAGACCGGCATCTCACAAAAGT
CGGACGACAATCGTCCTTACATTTTAAGTTTGGTCAAATAAATCCTTTTACTTCATTTAGTTTTCAAATT
GAATCCAATTCCTCTAGATAAACTCGTGTTCATGAAAAATTGTTGCCATGTGATCACACATTAAGTAATA
CTCTAAAAGGCGTGGGGAAACTACTGTAGCTTCCCCACGCCTTTCACTTATTAATATATTATATTATTAT
AATTATTATATTATATTATATTACAGAACTGTTTTTTTTTTGTTTTTAATTTTTTTTTGTTTTTTTTTAA
TGAATTTTTTTTGTTTGATTTAGTTTGTTAATATGATAAAATTTTTTTAATGAAAATCTAATAACTAATT
TTTGAAGATTTTCATGATACGGATCCCGGGTTTGATGGGTTAACCTGATTTGACGAGTTAATCCAGATTT
TTTTTTTATTTTTAATTAATTTTTTTATTTAGTTTAGTTTGTTAATGTTAAATTTCTTTCTATTTAATTA
TCAGACTTTCATGACACGTATCCTGGGCTTGACGAGTTAACTTGGTTTGATGGGTTAACCCGGTTAATTA
TGGGTAAACCCGTCAATTTTTTTTTCTATTTAGTTATCAAACTTTCATGACGCGAATCCCAGGTTTTACG
GGTTAACCCAATTAATTCAGATTTTTTTTTCTTTAGTTTTTTTCTTCCTGTTGGTTTTTTTTTTTTAATT
AATCTATTTAATTATCATACTTTTATGACACGACCTTATAGCCAGACCCACATCCAATATTCTTGGGTCC
GGTGTTGCAGCCAGACTTACTTAAACTTGGGTCATGCAAGTTTAATGTTATTATTAATATTATAAATATT
ATTTTTAGGTCAGGCGTTGCAGCCAAACCCAAGATTTTTGGGTATAGCTTTGCAGAAAAACCTAACACTT
TTAAATTTTAATTTCTTTTTATATTTTTTATGCAAAAAAAAATCCGTCGGGAGGGTCATGTAACTAGTGT
AATTATATAAATGGATGAAAGACTCCATGGGATCCGTTTAGTTTGGGAAAGTTGTGGCTGTGGCTTTTGA
TTATATTCCAAAGCTACAAATTATAAAAATATCTTTAAAATCATAAGCGTGATATTATTTTTTAAGTATT
ATTAAATGCTTGTTTCGCAGCTAAAAATATCTTAAAAATCATAAGCGTGATATTATTTTTTAAGTATTAT
TAAATGCTTATTTTATAATATAATAAACATTATATTTTAAAGTATTTTTTGTATAAAAATATATTATTTT
ATTTTTTAAAATTTATTTTTAACATCAACAATCAAAATTATAAAAAAATATTTTAAAATTTTTAATTTTA
AATAAAAAAATTAAGCAAATAAATCTTTTTTTTCGGAGTTAAAAAATAATTTTATAAAAATTTAAGTTTT
TATATTTTAAATTAATTTTTTTATATTATTTTGATGTATATCAAAAATAAATTGTTTTTTAAAAAATATT
TTAATATATTTTAAAAAACACAGAGAAGACGCTGTACTTCTGGTTGGCTTCCTTTAAATATCCACAGCAC
TAAATTTTCACTTCTATCCTCACTAATCTCTCCACTGCTTCCTGCTTTTACTCCTACTGTTTATCTCTGT
GAATC
Sequence ID: 57
Sequence Length: 3049
Sequence Type: DNA
Organism: Poplar sp.
AATATCAAAAAATAATTTTTTGATAAACACAATTTTAAATAAACGGAGCAAAAAAAAACACTGTGCTGAC
TATTCTTCTTGTTCTGAAGAATTGTTTATGTGTCAAAAGAGGCCTTAAAAAGTTTAGTTTTTAAAAATTT
AGGGTTTGTTGAGTTGAGCTTTGCATAACTCAAATAGAATATAACCTGAGTTCAAGATATAATCCTAAGG
TGGATCATCAACTACCAATAAACAATTTATCGCTTTTTTAATCAATCAATTCGCAAATGTTTAAAAGAAT
TTAAAGTCTCCGTTTAGCAGAATAATGAAATAATTCTTTTTATTGGATAATTTTCAACTTTCTCTTGAAA
AATTGGTAGCTTATCGTCTAATTTCTAAAATAAAATTTATGAGGATTCATTTTGGAAAAAAATATATAAA
AAGAGGGGAGGGGGGATGTTTGATTTGAACTTATTGCAATGTTTTAATAACGACGACAAAGACAAGAAAT
ATGCCTCGTGTGTGTGAGCTCAGACACCGCGCGTGTGTTTGTGATTTTTTTATTTATAGTGGAGTGTGTT
TCTTAAACTATTGGTCTCGTGAATCAATATTTGTCTGATAATGAAAAATAAATCTTGAGCCTACGTTACT
CATTATAAGTTTCCAATACATTATTATATCTCATTTATAGTGGGTGGGGCTTGTGTCGATATTCCATATG
CTTAGACATGATAGAATATCAAGTTTGGATGATATAAGTCTAGTTTATTTTTAGAACCAATACTTCTAAA
CATGGCTATGAGTAAAGCCCATGTGAGAATAGGTCTGATGAGTTATCAGACCTAGTACCCCTAAGCCTGG
GTGCGTGCCAAGCCCAAGCAAACAAAGATTTGACAAGCTGTCAGACTCATCATTCTTGTACATTGGCATT
GTATCGAGCCCAAGTGGGTGTGAGTCCTCACAAGTTGTCACACCTAGCATTTTTGTGTGTGATTGCACGC
TGAGTCTAATTGGACATGTGTTTAACGATTTGTTAGACCATCTCTTTTAGGCTTGGCTGTGCGCCAAGCC
CAATCGGGTAAGGTTCCGACGACCTTCTCGACCCGTCAACTTAAGGAATGGTTGTGTGCCAAGCCTAGTT
GGACATGGGTACGACGTGCTATCAGACCTAACATCCTTGAATTCGGTCAAGTGCCAAGTTTAACTGAGCA
AAGGTTTGACTCGCTGTCATACCCATTGCCCGAGGGCTTAACTTTGTGCCAAGCACGAAGGGATAAAAAG
ACCTGGAAATCATTATAGACTCCATGTTAGGCCACCAAGCTCAATTTACTTATTCTTATGATTTTTTTAA
TATAAAATGCTAATATCATGGGTATTTGCCTCTCATCCCTCGTTAATATTAATGTTATGAGTATCTCATT
CCCTATTAATATTAGTGTTAGGGATATCTCAACTCATATTAATGTTAATGTTATAGATATTTATCACACT
AAGTGTTGCAATGGTAGAAAGACCTCTTAAACTCTTAAGAAATATCTTTTGTACATGGTATTAAGAGTAT
AAATACTCCAAAATCACACAGGCAAAGAGTTTATGATCTTTATTCTTAATAAAAAATACATTCTTAATTT
TATAGCATTTACTGCATCAAAACTAAGAATAAACACTTTTGTTCTTAAGAATAAATGCTTATTTTTTTTA
TTTATTATAATAATTTGCTTAAAGGTTAATAATTTTATCATGTGAGGATTCCAAACTCATAGGGATTGCT
TTGTAAATTATATGTTCTTTACATAAAGCTACAAGTTCCTAAGCAATGAAAAATAAATTATTTTGCTAAA
ACTTGTGATTAACACACAATACAACCCCTAAAAAACTTATTCATGATTTTGGAATATTATCCATTGTAAT
TTTTACTTGTTAAATATTTTATATTTTTTATAGGAGTTAATTATTTTATATTTAATTGTGTATTAAATGA
TAAAAATAATTCAATATTTACATGAACTTGATATTTATTATTTTATTTCTTATTTATCATTAAATACTGT
ATCATGTTTATTTATATGAAATACTCAAACCCGCTTTATTGACATTTCTAACACGTGTTCATAGATAAAG
TAATTTTTCTTTGGATGTAAAAAAAAGTCAACAAATATTTATTTCGAATCACCGAGATTGTCCTCCGAAT
CATGTTAGTAAATTCCAACTTGTTTACCCAGTCACCACGCAAGCTGAGGCTCGTGAAAGCTGATATCAGC
AACCAGCAGAAAGCTCCAGCTGTCCACGACCAGAACTATCTTTTCATCGGGGGCCGCCATATTTGAGCCG
CCAGACATCACTCCGAACAGTCCCGTCTAGAACACTAAAACTCCCACTCTCATCAAGGGATGTGCAATAC
ACCTCCCTCCTGAACCACGTCTCTCATAATTAACCAACCACTCAAAACTAACTTCAGACAGCACAAATCG
CGTGAAGTTACTTTCGTGCCGCCCACAACAAAGAGAGGAGGAGGTGTTCGCTATTGTTTTCTAAAGTGCA
GAGAAAGTATTAAAATAGTATAATTTTTAATTTTTTAAAATTTATTTTAATATCAACTTATTTAAAAAAT
TCAAAAAATTCAAAAAAATCAATTTTTAATAAAAAAATAAGTTGAAATTCAGAAGAAGAAGAAGAAGATG
AAGAAGAAACCGTTAACGTAACGTAAACGCAACTCTCTCATGTACCTTTAAAGCTCTGTTTCTAGTAAAA
TCTCTCATCTGTTTTCCGTTTCTACTAACGGCAATGGGTAAGAACAATGCCCTCTTCACCCCGCAATTTC
TCGTTTGATTTTCTCATGTTGTTTTAATTTTCATTTTCATTTTCTCTGGATTTAATTTCTTTTTTTCTTT
AACACAGCAGCATCCGACAAGAAGATTAAGATCGGTATCAACGGTATTTTTCTTCATCTTTCTGACATGT
TTTGATTTCTTTTTAACATGCATTAATTTATTAAACATTAAATAAAATAAAATGTGGATAGGATTTGGAA
GGATCGGTCGTTTGGTTGCAAGAATTGCTCTTCGAAGAG
Sequence ID: 58
Sequence Length: 3000
Sequence Type: DNA
Organism: Poplar sp.
CTAGTTTTTTAGTAGCTATTATTATATGTTCGTATTCCGCAGCGGGTCAATATCAATTTTTTTAAAATGT
AAAGAATATATTAAGAATATAGAGAATGTTTTAAGAGTCTTGAGTCTGACAGTCATGCCAGACCCATGAG
ATTTGGATCTAGCAGCCACACTAAATTCAAGCGTCTTAGGTTTGACAGCCTAGCAAGACCCAAGTGCCTT
GGATCTTGCAGCCATGCAAGACCCAAGCGCCTTGGGTCTACTTGGGTCTGATAGCCATGTCAGACCCAAT
CGCCTTGTGTAGTTTTGTTTAGGTGTGTCTAGGCTCGGGTTCAGGTCTATTTAATTTTTTTATATATATA
AATTTCATGTGGATTAGGTGTAGTGCTTACCAGAATCTGAGCAGATGATGATTAAAATGTTGAGACTTAT
AATTTTTGTATTTTTTATATATAAAAAAAACAATCAATTATCCTTTAAGTATCATAAACCGAATTCCAAG
CTAAAATATTATTTATAAACAACAAATCATCATAAAAATCTAATTTATTAGATCTAAAAATTCAAATCAT
ATCTTCCTATTGAAATTGTTCATTTTTTATGTTCATGAATTTGTTATTGCTTCAACAGAAATTATTTCTC
TTTTTTTTATGAATTTTTTTATATTTTTTTAATCAAACTCAATGCAAAAAAAATGTTTATTTAATGGGTG
GTCGTTTGTGATTTTTCACTAACCACAATATTATTTTATATTTTTTAACACCACTGGACTATATGTATTT
AGTTTCATTATACAATTTATTTAGTTTTTTAAGTGATTCTTCTGCCTACTTTATGACATCTATTGCTATA
TTAAAGAGTCCATCATTTCATCGCACGATGTTAGAAAGAAAAGATATGGAGCCCTCTTGAATGGAAGACT
TAACAAATCTAGAAGAAAAGATATGGTTGTCATATCTAGATGCGGGTCTGGCATACCTAGGCACGAATCT
AGCATGGTTGTCAAGCCCGGACGCGTACGTCCAGACCCAAGCGACTTGAATCTAGCAACCATGCTAGATC
TGAGCGCCTTGGATCTTGCAAACTATGCCAGACCCAATGTGTGTGAGTCTAGCAGTCACACCAGACCTAA
GATACTTAAGTATGGTAAGCATGTCTGATTTGACAAATAATAAACAAAGATGACAATTGTGCATTATAGT
TGTCAGGAGAGAGAAAAGAAAGAAAAAACGCAAACAATCGATCACCAAAGGCAATCTAACCATTATCTGT
CTACATGTGCCACACCATGTGGAAGAGAGCTTGAATTTGCATCTAATGAGACAGCGGATGGCTAGATTTG
GCCACCGAGAAGCATCACACGCACCTCTTTAATGGCGTGGGTGCCACCCACTCGCTGGGGAAGAAAAAGA
AAGCCAAAGATATGTCTTGTGTGAAAAGATGAGAAATTAAAAGTGAAACTACTATTACAATTCACGGTTA
AATGTCTCTTGATCTATAGTGATTTTCCCACACAATTTAGCTTTTGTTATAATATCACGGGACAAATAAT
TTATCTTATAGCAAAAAAAAAAAAAAACATGCAAGCTTTTCTAACATGTTTTTTTATACAAAAAAAATAA
TCATAATTATAAATAAAAAAAGCCTACGCATGCATTTAATTAAATAAATCGAGAATTATTTATGCTAATA
AATGCAAAAAAAATGTTAAGGTATCTATTAGACTCACTTTACTGCAAGTCGAATATTTTTTTATAACACA
AAAGAATAAATGTGTAAGTGTATTTTCTGACATCGAGTAAAAATTATAACTTTGAATTAAAAAGTTGATG
CCTACGTATAAAAAATAAAGTGAAGATCATATGCGTTGCTAAAGACGTGTAACATCTCAAGCAAGTTTTT
ACTTAGTAAAAAAATGAGATAATGCTGCAATTTGTATGGTGAAATATCATTTTCTTAGTATTTGTATAAT
AAGTTTTTTTTAAAAAAAAGTGTAAAGGGAGAAAAAGAAAAAAATACAAAAGAATGAAGATAAGAATAAA
AAGAATTACATAAATATATCAAGTGTAGAGTGATAAATATTTCAAGTGTAAAGAATACAAAAAATATTTT
TTCTTCCAAAAAAAGAAGGAAAAACTAAAAAATAAATATTATAAAAGAATGAAGATAAGAACAAAAAAAT
GGTGATAAATAGGCAAAGTGTAAAGTGAAAAATATGTCAAATATAAAAAAGAAAAAAGAAAAAGGGGAAA
AATCTAGAAATTATTTTTTCTAAAATAACAGATTATAGATTTGTCATTGCTTTAGTAACAACATTGAAAA
AAAATTATAGTTATGTCATTTCTACAGTAAAAGATTTTAACGAGGTAGAAAAATTAGCCTAACAGATTTA
GTTTGGTTGGGTTTAGTTTAGTTTAGTTTTTGTTTTTTTTTTTGGTTTCTCAAATCTAAAACAGAAAAAT
GAGCCAAACAGATTTTCTTTAAATTTTCTATGAAGTATTTTCAATTTAATATCTCATATAGGTTTTTTCA
ATTAATTTTATATCATATTTTCGACCATATCGATTATTTTGTCCACTCCCTCTCAACAAAGGTCGAAGTT
CCGTGCTGCACAACCCTAGCCATTCCCATCTCTTCATACGGTCACTTCAATATTAGAGTACAAGAAAAAT
GAGATCATGGAAGCTTGAACTCAAGATACCTTTCCCACAGTACCAATCAATTACTCCAAAAACAACTCCA
AACGTCTTCTAAGCCACGTAGAATTAAGGCTAGTCACATCCTCCAGCATCACCTAGAAAGAAGCTGGTTA
CAGAACTGTGCCTATAAAACCCCATTGCGCTGTTTTGAATTTGTAGAGCCAATAAAAGAACACTCACTTA
CAAGGCTGTAGACGCATATACTCTTATACGTACCATGGCCGCAAAAAAATGCAGTATTCATATATTTCTG
CCATTTCTCCTTATTTTAGCCACAAAAATAGTCTGTCGTCCTCTTGATGAGCAGGAATAT
Sequence ID: 59
Sequence Length: 3151
Sequence Type: DNA
Organism: Poplar sp.
GAAAGTTATTTTGTTTTTAAATTAGTGCATGCTCTTCTTTTGAAAGAAAAAAAATATTTTGACATATAAT
TAGATAAAAAAATTTGTCAGAATTCCCTACAACAACATGAGATTAAATATCTTAATCTATATTTATCTCT
TAACTTTTTAACTTAGTCTTAGATTAAAATTAACAGATTTTTAGTATTTATTGACATATAATTCTCGATC
AATTTTGTTAAATATATGCACCAAGTTTTATATAAAAACTTTTGATATGACCTATGGTGAAATGCAGGTA
AACTGACAAGTAGAAACTAAAATTAATAGAACTTAATTAACAAAAACTACAACTCTTTGGAAAAAAAAAA
CATTGTTCACCTAGATTCAAGGGCCATGTTCGTTGGAACAATGTAATAACGATTTTGCTCTTTTCATAAA
AAATAATTGAACTAGCTATTGGCGGTTGTGAGGTCTTTGCATAAGGTCCATTAGTTATTATCAAATTGTT
CGGGGCGCAAGTAGATCGTTTTCCATTTTAAAAGCACAGTGAAACAACTAAAATATTCAAGGAAGCAAAA
CTTTTGGAGGTGGCGTCTAAGGGCATTTTCATCTTTTCACACTAGTATTTTGGTGATGGTTATGTTGGAT
AAGGGGCAATTTGGTATTTTAATACATGTAAAATATAATTAAAAAAAACGTAACCGGCACATGCAAGGCA
CTCATCAACGCGTCCTGGAGGCAAAAAAAATCCGGTTTTGTCCTTTTGTATTTAATTAATTTGGAATTAA
AGTACATTGTGTTTTTCTTTTTGAAAAAGGTTTTTTGTTGCCCGATTATCACAATTACTTTTTTTTTGGT
CTATTTAATATCATTGTTTTTTTTTAAAAAAAAATTTAATTAAAATAAAATCAACTTATTTGATTTAGTT
GATTCTACGAGCTCAACATTATTTATTTTTTATACGAGAAGAAATGGCCCTGCGGTGTAAAGTGGGTTGT
TGAGCTAGTGTTTTAGCTAAAGCATCAATTTAAGCAACCTTGAAGTTTCGCAATAAAGTTTTCTTCCTTG
GAATGATTGTGAAATCAATGGAAATTAAGTTATGATCCAATCAATATCACAAATAAAAATTATTGCATGC
ATATTTCAATTATTTGGATGAAGCTGTGCCGAGGCTGTTGTAAATGGAATCTTAATTTCATCGACAAAAA
TAAAGGAATCCAAACTTATTGATTAGTACAGTGCTTGAAACGAAATCAAAAGCCTTTGCCGTGATTTGCT
CTACCAGTGTTGTCTTCGGCATTGGTCGTTAAAAAAATCATCCCACGTATCGGTTGGTTCGTCTCGGTTT
TAATTAAAAAATTAAATAAATTAAGGAGATGGAATCTTCCCCCATTCCATTAATTATTGACAGTCATGGT
TCGATCGTTGATCACACGTACACGGTACACTGGCAAGAAGAAGAAGATGATGGAAGTTCTAACCAATGGG
ATGTGTTGGTCTGTTCCTTTATCAAAATCTAAGCCCCAAATTTCCACTGAGCTTCTTGACTCCTGTGGTT
GGACCCCTAGGACCCTTCCTTGGTTGCCGTGATTTGCTCTCTTCTAGTACTTTTTTTTTTTTAGATCTCA
TCTAAATCTTGATTCATTTGTTCCTTGTCCACACAAGACGGTGATTATGCAAGTTTGATGCTTGATTTTG
TAACGAGCATGCGTGATTAATGTTTTTGACACGTTAATATACATGCAGTCATGCTTTTTTATTTATTAAC
AATTCTACTGAAATTTTAGAAAAGTTTCCTTTATATGTAGACGTACAAAGTTATTAACTACTCCTTCCAT
ATCACAAGTTATTATCACAAACATGGTCTAGTTGGTCTAATTTCTATTACCCGAGTCGCGGGTTTGGAAA
GTTAATGCTCATTGGCATTGTTTTTTTTTATATAACTAATTTTCCTTTTTGATACCATCATTTGACATTT
TTTTATATATATATAAAAAACAGGCTTTGTAATTCTCTTTGTTTTCTTTTCTTTTGGGTTATCATTATTT
CATTAACTGAGCTGCAGGTTTGACAGGTTAACTCGGGTTGACTCGGTCATGCCATAAAAATTTAATATTA
AATAAAAGCTAAAAGAGTAATAAATCAAATTTCATACACTTAAATCTTGAATTATATATATAATTTTTCT
TCTAAACATGTATGAAAGTTAGAGCACCCATCCTTTTTATCCAACTCTATATAAAATTTCATGAACAATA
GTTATAAATTTCAGAATAATAACACATCAAGATATTCGTACTCGACGTGAGAAAGGTCTTACTCTCAATT
TCAACTTAATTAGTGTATTTGGATTTACATAGTTATGAAATATTTGATAATGATTTGTTATTGACCTTTA
ATTTATCAAAAACAACTTAATAATGATAGTTGTTCACACGTATGTACACGGGCAAGAAGAAGAAGATGAT
GGAATCTTCCCCCATCTTATTTCACCAGTGATTTTCCGTCAGCAAGTTTTTTTAACATGTTATTTTATAA
AACAATTATGAAAAAATAAAGAAAAGAACAAAAAAAATGACATAAATAGACTAAGTATAGGGTGATAAAT
ATTTCCAAGTGTAAAAAATAAAAAGAAAATTTTCAAAACAAGTATAAAGAAAAAAAAGTTAGCCAACAAA
GATAATTTGTTTTTTTTTTTTACTTTTATTTTAAAAAATGCAGTTTGGTTTGGTTTAGGTTTCTCAAATC
AAAAACAGAAAAATGAGCCAAACAGATTTTCTTTAATTTTTCTATTAAGAAAAATATTGAGATCATGGAA
GTTTGAACTCCGAATCTTGATGCTACACTTATATTTTAAATTAATTGGCGCACATATTACTCCAAATTTG
ACTTCAAAGCTCCAAACGTCTTCTATGCCCCAAACGTAGAATTAAGGCTAGTCACATAGAAAGAAGCTGG
TTACAAAACTGGGTCTATAAAACCCCATTGCGCTTGTTTTGAATTTGTTGTGCCAATAAAAAAACACTCA
CTTACAAGGCTGTAGACGCATATACTCTTATACGTACCATGGCCGCAAAAAAATGCAATACTCGTATTTT
TCTGCCATTTCTCCTTATTTTAGCTGCATGGGCAACAAATAGCTTGTCGTCCTCTTGATGAGCAGGAATA
T
Sequence ID: 60
Sequence Length: 3000
Sequence Type: DNA
Organism: Poplar sp.
CGACACTTTCTTTCTTTTTCCCTCTTTTCTCTTATCTCCTCCCCTCAAAATTCATGCTAGCCATGCAAAA
TTTTGGAGTGGTCCTTTTTTTATTAAGATTTTAAATTTGACCATTTTGTAAAATTTTGATTTGTTTCAAT
TTCATCTTTCAATCCAAATTTATGATATATTTTTTTTTCATTTTAATTCTCATTCTTTTGATTTGATTTT
TCTCCTTTTGTTAAATTAATTTTTCTTTTAAATTTCACCCTTCAATAAAAAAAAACTAGTTTCCCTCTAA
TTTATTTATTTTTATTTCAATGTTGAACTTAATTCTTTTAATTGCAATTTTTTGTTTTATATCCTTTTGT
ATAATTGATTTTTTTCATAATTTCATCCCTCAACATTCGATTGGTTGGGCGTTGAAACTCATGGTTTTTC
TAGGTGGAGTGTTTCCGGTCTAATAACCTGCATTGCGGCTTTGGAAAGTTAATGCGCATTGACATTAATT
TTTTTATAACTATTTTTTTTTTTTTTTGGGTTATCATTGTCTCATGACCTGGGCTGCGAGTTTAGCAGGT
TAACCCGGGTTGACTCGGTTTTTTTTATATAGCCATTATTTTAAAGAAATTTTAATTTTTTTTCAGTCAT
GTCTTTCAAAATCCGGTTTTCTCCTTTTGTATTTAATTAGTTGGGAATTGAAGTACATTGTGTTTTCCTT
TTTGAAAAAGGTTTTTTGTTGCCCGATTATCACAATTACCTTTTTTTGGTCTATTTAATATCATTGCTTT
TTTTAAAAAAAAAAATTTAATTAAAATAAAATCAACTTATTTGATTCAGTTGATTCTACAAGCTCAACAT
TATTTATTTTTTATACGAGAAGAAATGGCCCTGCGGTGTAAAGTGGGTTGTTGAGCTAGTGTTTTAGCTA
AAGCATCAATTTAAGCAACCTTGAAGTTTCGCAATAAAGTTTTCTTCCTTGGAATGATTGTGAAATCAAT
GGAAATTAAGTTATGATCCAATCAATATCACAAATAAAAATTATTGCATGCATATTTCAATTATTTGGAT
GAAGCTGTGCCGAGGCTGTTGTAAATGGAATCTTAATTTCATCGACAAAAATAAAGGAATCCAAACTTAT
TGATTAGTACAGTGCTTGAAACGAAATCAAAAGCCTTTGCCGTGATTTGCTCTACCAGTGTTGTCTTCGG
CATTGGTCGTTAAAAAAATCATCCCACGTATCGGTTGGTTCGTCTCGGTTTTAATTAAAAAATTAAATAA
ATTAAGGAGATGGAATCTTCCCCCATTCCATTAATTATTGACAGTCATGGTTCGATCGTTGATCACACGT
CCACGGTACACTGGCAAGAAGAAGAAGATGATGGAAGTTCTAACCAATGGGATGTGTTGGTCTGTTCCTT
TATCAAAATCTAAGCCCCAAATTTCCACTGAGCTTCTTGACTCCTGTGGTTGGACCCCTAGGACCCTTCC
TTGGTTGCCGTGATTTGCTCTCTTCTAGTACTTTTTTTTTAGATCTCATCTAAATCTTGATTCATTTGTT
CCTTGTCCACACAAGACGGTGATTATGCAAGTTTGATGCTTGATTTTGTAACGAGCATGCGTGATTAATG
TTTTTGACACGTTAATATACATGCAGTCATGCTTTTTTATTTATTAACAATTCTACTGAAATTTTAGAAA
AATTTTCTTTATATGTAGACGTAAAAAGTTATTAACTACTCCTTCCATATCACAAGTTATTATTACAAAC
ATGGTCTAGTTGGTCTAGTTTCTATTATCCGAGTCGCGGGTTTGGAAAGTTAATGCTTATTGGCATTGTT
TTTTTTTTTATATAACTAATTTTCCTTTTTGATACCATCATTTGACATTTATATATATATATATATATAT
ATATATATATATATATATATATATATATATATAAAGCAGGCTTTGTAATTCTCTTTGTTTTCTTTTCTTT
TGGGTTATCATTATTTCATTAACTGAGTTGCAGGTTTGACAGGTTAACTCGGGTTGACTCGGTCATAACA
CAAAAATTTAATATTAAATAAAAGCTAAAAGAGTAATAAATCAAATTTCATACACTTAAATCTTGAATTA
TATATATATAATTTTTCTTCTAAACATGTATGAAAGTTAGAGCACCCATCTTTTTTATCCAACTCTATAT
AAAATTTCATGAACAATAGTTATAAATTTCAGAATAATAACACATCAAGATATTCGTACTCGACGTGAGG
AAGGTCTTACTCTCAATTTCAACTTAATTAGTGTATTTGGATTTACATAGTTATGAAATATTTGATAACG
ATTTGTTATTGACCTTTAATTTATCAAAAACAACTTAATAATGATAGTTGATCACACGTATGTACACGGG
CAAGAAGAAGAAGATGATGGAATCTTCCCCCATCTTATTTCACCAGTGATTTTCCGTCAGCAAGTTTTTT
TAACATGTTATTTTATAAAACAATTATGAAAAAATAAAGAAAAGAACAAAAAAAAATTGACATAAATAGA
CTAAGTATAGGGTGATAAATATTTCTAAGTGTAAAAAATAAAAAGAAAATTTTCAAAACAAGTATAAAGA
AAAAAAAGTTAGCCAGCAAAGATAATTTGTTTTTTTATTTATTAATTTTATTTTAAAAAATGCCGTTTGG
TTTGGTTTAGGTTTCTCAAATCAAAAACAGAAAAATGAGCCAAACAGATTTTCTTTAATTTTTCTATTAA
GAAAAATATTGAGATCATGGAAGTTTGAACTCCGAATCTTGATGCTACACTTATATTTTAAATTAATTGG
CGCACATATTACTCCAAATTTGACTTCAAAGCTCCAAACGTCTTCTATGCCCCAAACGTAGAATTAAGGC
TAGTCACATAGAAAGAAGCTGGTTACAAAACTGGGTCTATAAAACCCCATTGCGCTTGTTTTGAATTTGT
TGTGCCAATAAAAAAACACTCACTTACAAGGCTGTAGACGCATATACTCTTATACGTACC
Sequence ID: 61
Sequence Length: 3000
Sequence Type: DNA
Organism: Poplar sp.
ATGGTTATGTTGGATAAGGGGCAATTTGGTATTTTAATACATGTAAAATATAATTAAAAAAACGTAACCG
GAGCATGCAAGGCACTCATCAACGCGTCCTGGAGGCAAAAAAAATGCTCTTTTATTGTGTCGTTAAAATC
CTCGCAGCTTCCTCTTCCTATTAGAGCAGTGCCCGTAGTCGTTGGTGAGGTGGTTTTTTGTTGGCGACAC
TTTCTTTCTTTTTCCCTCTTTTCTCTTATCTCCTCCCCTCAAAATTCATGCTAGCCATGCAAAATTTTGG
AGTGGTCCTTTTTTTATTAAGATTTTAAATTTGACCATTTTGTAAAATTTTGATTTGTTTCAATTTCATC
TTTCAATCCAAATTTATGATATATTTTTTTTTCAATTTAATTCTCATTCTTTTGATTTGATTTTGCTCCT
TTTGTTAAATTAATTTTTCTTTTAAATTTCACCCTTCAATAAAAAAAAACTAGTTTCCCTCTAATTTATT
TATTTTTATTTCAATGTTGAACTTAATTCTTTTAATTGCAATTTTTTGTTTTATATCCTTTTGTATAATT
GATTTTTTTCATAATTCCATCCCTCAATATTCGATTGGTTGGGCGTTGAAACTCATGGTTTTTCTAGGTG
GAGTGTTTCCGGTCTAATAACCTGCATTGCGGCTTTGGAAAGTTAATGCGCATTGACATTAATTTTTTTA
TAACTAATTTTCTTTTTTTTTTGGGTTATCATTGTCTCATGACCTGGGCTGCGAGTTTAGCAGGTTAACC
CGGGTTGACTCGGTTTTTTTTATATAGCCATTATTTTAAAGAAATTTTAATTTTTTTTCAGTCATGTCTT
TCAAAATCCGGTTTTCTCCTTTTGTATTTAATTAGTTGGGAATTGAAGTACATTGTGTTTTCCTTTTTGA
AAAAGGTTTTTTGTTGCCCGATTATCACAATTACCTTTTTTTGGTCTATTTAATATCATTGCTTTTTTTT
AAAAAAAAAATTTAATTAAAATAAAATCAACTTATTTGATTCAGTTGATTCTACGAGCTCAACATTATTT
ATTTTTTATACGAGAAGAAATGGCCCTGCGGTGTAAAGTGGGTTGTTGAGCTAGTGTTTTAGCTAAAGCA
TCAATTTAAGCAACCTTGAAGTTTCGCAATAAAGTTTTCTTCCTTGGAATGATTGTGAAATCAATGGAAA
TTAAGTTATGATCCAATCAATATCACAAATAAAAATTATTGCATGCATATTTCAATTATTTGGATGAAGC
TGTGCCGAGGCTGTTGTAAATGGAATCTTAATTTCATCGACAAAAATAAAGGAATCCAAACTTATTGATT
AGTACAGTGCTTGAAACGAAATCAAAAGCCTTTGCCGTGATTTGCTCTACCAGTGTTGTCTTCGGCATTG
GTCGTTAAAAAAATCATCCCACGTATCGGTTGGTTCGTCTCGGTTTTAATTAAAAAATTAAATAAATTAA
GGAGATGGAATCTTCCCCCATTCCATTAATTATTGACAGTCATGGTTCGATCGTTGATCACACGTCCACG
GTACACTGGCAAGAAGAAGAAGATGATGGAAGTTCTAACCAATGGGATGTGTTGGTTATTATATGTAGAC
GTACAAAGTTATTAACTACTCCTTCCATATCACAAGTTATTATCACAAACATGATCTAGTTGGTCTAATT
TCTATTACCCGAGTCGCGGGTTTGGAAAGTTAATGCTCATTGGCATTGTTTTTTTTTATATAACTAATTT
TCCTTTTTGATACCATCATTTGACATTTTTTTTTATATATATAAAAAACAGGCTTTGTAATTCTCTTTGT
TTTCTTTTCTTTTGGGTTATCATTATTTCATTAACTGAGCTGCAGGTTTGACAGGTTAACTCGGGTTGAC
TCGGTCATGCCATAAAAATTTAATATTAAATAAAAGCTAAAAGAGTAATAAATCAAATTTCATACACTTA
AATCTTGAATTATATATATAATTTTTCTTCTAAACATGTATGAAAGTTAGAGTACCCATCCTTTTTATCT
AACTCTATATAAAATTTCATGAACAATAGTTATAAATTTCAGAATAATAACACATCAAGATATTCGTACT
CGACGTGAGGAAGGTCTTACTCTCAATTTCAACTTAATTAGTGTATTTGGATTTACATAGTTATGAAATA
TTTGATAAAGATTTGTTATTGACCTTTAATTTATCAAAAACAACTTAATAATGATAGTTGATCACATGTA
TGTACATGGGCAAAAAGAAGAAGATGATGGAATCTTCCCCCATCTTATTTCACCAGTGATTTTCCGTCAG
CAAGTTTTTTTAACATGTTATTTTATAAAACAATTATGAAAAAATAAAGAAAAGAACAAAAAAAAAATGA
CATAAATAGACTAAGTATAGGGTGATAAATATTTCCAAGTGTAAAAAATAAAAAGAAAATTTTCAAAACA
AGTATAAAGAAAAAAAAGTTAGCTAGCAAAGATAATTTGTTTTTTTTAAAATTTTATTTTAAAAAATGCC
GTTTGGTTTGGTTTAGGTTTCTCAAATCAAAAACAGAAAAATGAGCCAAACAGATTTTCTTTAATTTTTC
TATTAAGTATTTTCAATTTAATATTTTTCTATTAAGAAAAATATTGAGATCATGGAAGTTTGAACTCCGA
ATCTTGATGCTACACTTATATTTTAAATTAATTGGCGCACATATTACTCCAAATTTGACTTCAAAGCTCC
AAACGTCTTCTATGCCCCAAACGTAGAATTAAGGCTAGTCACATAGAAAGAAGCTGGTTACAAAACTGGG
TCTATAAAACCCCATTGCGCTTGTTTTGAATTTGTTGTGCCAATAAAAAAACACTCACTTACAAGGCTGT
AGACGCATATACTCTTATACGTACCATGGCCGCAAAAAAATGCAATACTCGTATTTTTGTGCCATTTCTC
CTTATTTTAGCTGCATGGGCAACAAAAATAGCTTGTCGTCCTCTTGATGAGCAGGAATAT
Sequence ID: 62
Sequence Length: 3000
Sequence Type: DNA
Organism: Poplar sp.
AAATACGACATCTCAATGTAAGTTTGTTTTGCTTTGAGTTGGTTTACATTTAACAATTTATGAACAAATA
ATATTTTATTAAATTTATCAATTTGCAGGTTCACAAACATTGAGGTTGCCCGAATAATAACATCAGCATT
TAAATCATCGATGGAAATTCTATTATTTCAATGAAGCCAGGTTTTCAAATATCCTGAATGGAAACTGCAG
GTCGATGCATAGTTTACAAGATTTAAGATTAGTTTTAATTTAAAATTTTTAGTATTTATTATGTTAATTC
ATTTACTTTATTGAAAAATTATTTATTTTTTTTTTTATAAATTTTTACTGCAAGGCTAAATTTGAGTGGG
ATAGAGCAAATGATAATGTAACGAGGAGGGTTTGAGAGAATTATGTTGTAACTAGGTAACATAAAAAATA
GTACGACTTTTTTTTTAATTTCACATATTAAAATTTCATTTGTCATTTACTCACATATAATATATTTGTA
TTATATAGGTTGCGTGATTTTTGGTATGAAGCAAATTTTTTTTTTTAAAAATATGCCAGAGAAAGCGCTT
TAGCAGGTTGGAATGACGTGACGATTGGAAAGGATTTTAGGCTGCCATACATCCTGGAGAATATATGGGT
GAAATATATTCAGCACGTGATGTCCGAGCGTTTCACACTATGCATACATTTTGGTGTGGGGAACCGGAGT
CGGTAAATTCACGGTTCGGTTACAACGCACACTAGCAGCTTCGTTCCATTTGTTTCACATGCGAAGCGTA
AGATTTATTTTAATCATATTTATTTTTAATTAATTTTTTGTTATTTATAAACATATTTAACTGAAAACAT
TTTTTTTCTTACAGGCTACGTCACTTAGAAGTGAGCTAAGCCCAATGGAGCTTTTTATAGAGACGCACGT
GCAGAGTGAAGACCGCCAAAAAAGGGTGTAGCAGTTCGTCGACAACCGAGCTCAACACTTTGCGGTACAT
TGGTTTTCAACCATTTTATTTCTTAAGTTATTATTTTCTTGAATTTGATGATTTCATTTTTTTATTTCTA
GGAGACATGTAATAGCCGGTTGAAGGAGAGATATGAGGACGATCCTTCGATCCACCTGGATTTTGATTTG
GATTTGTAATTGGAGGCAGGATTACCTGGTGGACCCGATAGAAATCGGGTGTACGGACTCTCCACCACTA
CGGTCGAGAACCTGCGGATGACCCATAATGTTTTAACCGTTGGGATAGAAATCGGGAGCTTGCAATTGCT
ATTGAGCACTCAGTCTCCAGAGTTCGCGGTCTTGTTAGATCAATGAGTGCAAGAACCATAGTTTTGAAAC
CCAACCCGGTGGTCGACCCGGTTTAATGATCGGGTCACGGGTCAGATGGGTTGACCCGGGTCAACAAAAA
AAATCAAATAAAAACTTTAATAAATACAATTCCCCTCTCTTATCCCTCTCTCTTCAATCGACTTTCCAAC
TTTCAAACCACTTTCCAGCTTTCAATTCATTTCCAGCTTTCCAATCACAAATAAACATTCTTTTTTAATC
AACAACAAATAGGCATTCTCTTTAAATTGAGAATAGAAGGTAAAGAGGAAAAGAAAATCTTAAAGAAAGA
GAGAGAGAGAGAGAAAACACATGGGCATCAAAACAGAAAACATCAGCAATCATGCATCAACGACAACGCT
GATATTCACGCACAAAACTTTGAAGAGGGGCTTTTCCAATCATGTCTTGATGCAGGATCTGATAAAAACC
GGGGATGTTGTCTTTAATGGAATCTACAGGAATGAGCAGGGATCACTACGAAGAGGATGCCGTGTTTGGG
GTAGAGGTGTATTACGGGCAGTCAGGCACAGGAGCTATGCGATTGAAATTGCTTTTTCTTGTTATCTCTG
TCTGCAATTTTGCATCCTTCATCCTTCATCTGCATCGTTTTGACTTTAAAAGGCCAAAACGAACGACGTC
GTTTCCTGGCTATGTATATATATATATATATAAAAAGAGACCGGGTCTTAGCCGGGTTTGTCTGGGTCGA
CCGGGTTTCGCCGGGTCAACTCCTCGATGGGTTTTTACTTAGACCCGGACCGGTCCTAGGCCTGGGTCGG
CCGCGTCGACCCGCCGGGCCGGTCCAGGTTTCGAAACTATGGCAAGAACATACAACCCATCTCAATGAAA
AATATAAACGACTCTCTACGGATTATAAAGAACTTGTGCACCCTTTTATTAGCCCTATGGTCCTGGGGAT
GACCAACCTCCTCTTTCCCCTCCAGCGTCGTCTTTGTTTTAGTTTTATTATATTTGAACAAATAAATTTG
TAATAAATATTTGAATAATTTATTTTTACATACTTGAATTTTATATAAATTTATTGAAAGTGTCTTTTTT
TAGTATTTTTTTTTTTATTCTTGTTGCTTCATATATATATATATATATATATATTTTATATATATATATA
GCCATAGGATCTTCAGTTGTAATTAAGTTGATTTTATTGGTTCTTAAACTTTGAAAAGGTAATACAACCT
CTTTTAATGTGAAGTTGTTAGAACAAATGCTTGAATCTTTGACAATAATGTTTATATTGCTTCGTCTAAA
TTTATTCAATAAATAAATATATCATATTTACTAATAGTTACAGAGAGACTACCATTTTCCTAGTTTTTTC
TCCGATGCAGTAACTTAAAGGAAGGCCGATTCTTGTTACAATCTGAAAGTTTATTTAAAACTATTCACTT
TGTGAATCAAACGGCACGGTAAGAGTATTTTTGTTTTCTTCTAAAATTAAAGATGGGACTAAATACTATA
CTCACAAGCCTAGCTAATATAAGGTGTCAAAATTAGAACATTTGTAAGGGCACGCATAGTTGGAAGGCCT
GTCTTGTGGAGCATACGAATTGACCGGAGCAGAGTCCCTATAAAAACCTCATAGGGTGCGTGAAGATAGT
ATGCCTACCAGCTTACTCATTGCTTCCCCAATATACCAGCTACTAATACCAAAGGCTGCC
Sequence ID: 63
Sequence Length: 3000
Sequence Type: DNA
Organism: Poplar sp.
AGTTTGGTCCTTGGTTCTGGATTTCTTCAATCAAGTCCCTAATTGGCCATCAAACTTCAATATTCATGCA
ATTAAGCCCCTGATTTGACCAAATCAACTCTTAAAATAGTAATTTGACCCCTGAATTTTAATTTCTTCTA
ATTAAAGCCCATATTGACTTAAAAAAATTTTTTTTCTTGCAATCAAACCCTTCATAAATTCAATTAAACC
TTCAATAAATTTAATTGAGTCCCTAAACATCTGATTTGGACTTTTCTTCATCAAATTGAATTTTCTTTGT
CAACAGGGCTCTCATCAATTAAAAATATACTGTCAAATTTTAATCTTTGTATTTTTGAACCTCCTCAACC
AATTTCTAGTCATTTCCTAAGCGCTCCAGCATCCTTTTCTTACTGCTATTATTTTTTGGATTTTTTGTTT
TTATTCCAAATATTTTTTTTGATTTTTTTAAGAGAAAAAGTGAATTTGGGAATAACTCAAAAATAGGTTA
TAACACCTTTTATGATCCTCTTGCTAGGACAATTGTAGATGTTGTATTTATCCTTAGAAAACTGACATTA
TGATTCTCATCACAAAACTGGCTTATGCTTAGTAGGTTACTTTAAGGTCATTCACAAATAAAACATTAGG
AAAAATAGGTAAACAATGAATTTCAACTTTTATTTTACCTTCAATGGTAGTTATGCTTCTATCTCCAAAG
GTCACTGAATCACCATTCGTGAATTCAAATTTCTTAAATTGACCTTTATCTCCTGACATATGTCTAGAAC
AACCACTATGCAGTGTGTACTACTAAACATATTTTCTTTTTCTTAACTACCTATTGATTTTTTATTTTGT
TTTGTTAGAACTTTCAGTCTCATTAGATTTCTCACAACCTACTGACTTATCAATTTTCCTTTCTATAGTA
TATAATTAATTTAAGATTAAGTCAACTTTGTATTCTAAATTTTACTTGCGAAACAGTTTCTTTTTACATG
TCCTTCAATTCTGGAACACTAATTAATAAGTAGGGATAAACTTACCTTTCAACTTACATTTTTGGAAGTT
TTTTGATTTGTCTTTTAGTATGAAAGGTTCCTTACCCTTTACAAAGGTAATCCCTTTCGAGGAAAAAGAT
ACAAATTTACTGTTGATGGAGATTTCATGTGTCATGTATCTTATTCCTGTACGATCAATACTTACTAATT
GAGCTTTCAACAATTCATCAAGTTTTTGTATTGCTAACGGTTCTTATGACTATTTGCACATAGTTAGCTT
GTTTTCAAATGCTTTGACTTTCCTAAAAGATCTAGATATCTTTACTTCTAACAACTTTAGGGCTTCTGCC
AATTTTTTCTTCTCATTCTTCATATCTGTCAGTTTATTGAATAATTTCTTGACCTTCACCAATTCTTCCC
ACAAGTCATCATAAGCTTCCTAAAAGCTTAGTTCATGATTGGCAATAACAAGAGTAATATCTAAATCACT
ATAATTACTGACAATCTGATCTATGTAAGAATCACACGATATCTCAATAGTTTGTTTCATGTCAATAAAT
CCGTTAAAAGTGTCAGAGAGAGCAACAAAAACAAATTCATTATCAGATGATGAATTAAAATTTTCAGAGT
TAGATTCATCACTTAAGGTGACATTAAGAGCTTTTCCTTTATTTCTTTTGAAATTAGGACAATCATTTCT
CAAGTGACCATATCCTAAACATTCAAAACACTTAACTATTTCCCTAGATTCAGTCTTAATTTTACTTTCA
TTTTCCGATTCATTTCTTTTGATAAAATCATTTACCTTTTCACCTTTATTAATTTTCTTCTTCTTAAACA
TAAATTTTCTGAATTTCTTAGCTATGAGAGTTATATCTTCATTATTAAGATTATCATTAGAAGAATAGGC
ATGTTTTTCCCTAGAAGATTTAAATGCAATGGACTTACTTTTTCTTTGATTAGGCAATGCAGATTCAATT
GTTTGTAAGGAACCTACTAGTATCAAGATCCTTGTTTTCTTCTAGGGATGTTACCTTTGGCTAAAATCTT
TCAGGTAAAGATCTTAAGATTTTCCTTACAATTCATGCATCCTCTACTTTGTCTTCTAAATTGAACTTGG
AATTCACAATTTCATTAAGTTTAGTATAAAACTCATCAAAAATTCATCTTCCAACATTTTAATTTTGGAC
AAAATTGTAAGACAAACTCGTGTTCTGAAAAAGCCAGTCTCAACTTTAGTTTCTACCTAGCTAGTATCAT
GTTGATCTATCAAAGTAAAAAACCACCTTTCAAGAAGGCAAATGCATGATAGCAACAGATTGATTTTGGC
AGAATAATCTTGCACGGAATAGTAATGTTATTTCACATACAACCTAACCTGGTCATTGACTATGCGGACT
CTGTATATTTTATTCCTCGTTCAAAAACAAAACGTTGGCTTCTTGAATCTAAACTCAAGAACCCATCAAA
ATCCATGTCCTAATACAGACCACCACGTTTACTAATAGCTACAGAGAGACTACGATTTTCCTAGTTTTTA
CTCCGATGCAGTAACTTAAAGGTAGGCCGACTCTTGTTACAATCTGAAAATTTCTTAAAACTATATATTC
ACTTTGTGAATCAAACGGCACGGTAAGAGTATTTTTGTCTGCTTCTAAAATTATAGGGCATCTGATGCCA
AAAGATGGGACTAAAATCACTGCACGAAAACCATTTATTAGCTTACTAAATACAATACTCATCAGCCATT
AGAAAATATACTCATGAAGGGAAAGTTTGAACTGTCTGAATTAATGCTGGCTAAAAAACACAACACTATG
TCAATTAAATTAGTTAATCATAGGGGTCAAAATTAGAACATTTTGAAGGGCACGCATAGTTGGAAGGCCT
GTCTTGTGGAGCATACGAATTGACAGGAGCAGAGTCCCTATAAAAACCTCAAAGGTTGCGTGAAGATAGT
GTGCCTACCAGCTTGCTCATTGCTTCCCTAATATACCAGCTACTAATACCATAGGCTGCC
Sequence ID: 64
Sequence Length: 3061
Sequence Type: DNA
Organism: Poplar sp.
TTTTTATAATGTAGATAAAGTCTTAAAATAAACACATTATTAAGGTAAGCATTTTTCATTCCTAAAGTCT
ATAGTTTTTTTTTTTAATTTGTTCAATATATTTTATTGTTTGTATTGCCATCATAATTGAATACTTTTTG
AATTTCAATTGTTATTGTTGATTTTATTTTTTTATATTTCTTTGTTTTAGCTATTGTTATTTTTGTTGTG
TTTTTTGTTTTGGTGTATTTTTATAATGTAGATAAAGTCTTGAAATAAACACATTATTAAGGTAAGCATT
TTTCATTACTAAAGTTTATAGGTTTTTTTTTTATTTTTTCAATATATTTTATTGTTTGTATTGCCATAAT
AATTGAATACTTTTTTTAATTTTAATTGTTATTGTTGAATTTACCTTGTAATTAGTAATTGAATATATAG
GAATAAATTTAATTATTTTATCTCAATTTTACTCTATTATTGCATGATATGTGCTTAATTATTTTCATTA
ATTTTAATTGTTATTTGTATAGATGTTAGGTTATATACAAGATTTTTGAATGGGGTCAAGTGGTTGTGGC
TATTGTTAATATTTGCAGGTTTGAAAACTTTGGATAGTCTCCAGTATAGGGGAGGTGCTGTCGAAATTTT
TTTTAACAATCGTATTTAATTGTATAATTATTTGTATAAAAGTGTGTAGATGCTTAGAACGAAATCAACA
GCTCGTCGCTCACATATGGTCGCAGCTAGTTCTTCTAGCAACGAGGATGACATGTCCTTAGGTGTCAATC
AAGAAGAGGTACCTGCGCCGCCTACTGATGTTGCCTCTTCTAGCATGGTTTCATAGCGCAAAGGTGGTGT
GCCTTCACAGCGGAATCAATTCACCCGCAAGTACGAGGCACAGTGGAAGGATGACCTTTCAATATAAGTT
TGTTTCGGTTATAGTTTTTTTTTTTAATTATAACATAATTTATGAAAAACTAATCAATATTTCATTAATT
TAATTTATTTTCAGGTTCACAAACATTGAGGCCGCCCGAGTACTATCATCGGCGTTTAAATCATTGATGG
AGATTTCATTATTTCAATGGAGTCGGGTATCCAGATATCATGAATGGATACCAAATATCGACGCATGGTT
TGACAAATTTGAGGTTGGTGTTAATTTCTAATTTCCAGCTTATTTTTAATAAATTATTAATATAATTGTA
AATAAATTATTATTTTTATTTTAAATAAATTATTTATACACAACACAAATTCGAGTGGGATAACGCGCTT
GACAATGTTGTGAGGAGGGTGTGGGAAAATCACGCGACAACTTGGTAACATCGAAAACAATACGATATTG
TTTTTTAAAAAATTATGTTTTAAAATCTAATTTGTCACTATGGAAGTAGGTTGCGTGATTTTTGGTATGA
AGCACAAAAAAAGGCAAAAAAAAACGCGAGAAATAACGATCTCCAAGGCTAAAACGACGTGGCGGTTTGG
AGGGATTTCAAACTGCTAGACATCCTGGGAGATATATGGCCACAATATATTGAGCACGTGATGTTTGAGC
GGTTCACACGATGCTCACAGTTCGGTGCTGGCAACCAGAACCGGCAAATTCATGGTTTGGTGACAATGCA
CACCGACGGCTTCGTTCCGTTTGCTGCACATGCGAAACGGATGGTAAGATTAATTTAAATGAAATATATC
ATTTAATTTGTTGTTACTTAATTAATTTTTTTTCTTACAGGCTACGTCTTTTGGATGTGAGTCGAGCCCA
ATGGAGCTGTTTGTGAGAGACGCACGTGCGAAGTCAAAACTGCCAAAAGTGGGTGCAACAGTTTGTTGAC
AACCGCGCTCAACACTTTGTGGTATGTTCGTTCAACCATTTTATTTCGTAAGTTATTATTTTTATTGAAT
TAAATATGATGATTTCTTTTTTCATTTTCAGGAGACCTATAATAGTCAGTTGAGGGAGAGATATGGGGAT
ATGATCCTTCGACCCATCCGGATTTCGATCCGGATTTGTGGATGGAGGTAGGATCGTCTGGTGGACCCGA
TAAAATTCGGTTGTACGGGCTCTCCAACACTACGGCCGAGAACTTGCGGGCGGCTCTTAGTGTCTCAGCC
GTTGGGAGCTCCCAATCAGTATCGAGCAATTTATCAAAGGAGTTCGTGGCTTTGCAGCAACACACAGCTC
ATCTCACCGAAAAATACAAGCAACTATTGGCGAATTATGAACATAACATAGCTCACACAGCTCATCTCAC
CGAGAAATATGAGCAACTCTCAGCGAATTATGAACAACTTTGCTAAATGGTCATGATCATAACATCACAG
AGTGGTGATACATGTGCGACCCCTTTTTGGTTGTATGGTCCCGGGAACAACCAGCCTCCTCCTCCAGCTC
CGTCATTGTGCTAATTTAATATTTTTTTGGAAACACATTCAATTTTTTTTATTTAACATTTAATTTTTTT
TATTTCCAATGGCATCAGACTACCATTTTTTTAGTTTTTTCTCCGATGCAGTATTAGGCCGACTCTTGTT
ACAATCTGAAAGTTTATTTAACGTATGCAAACTATTCACTTTGTGAATCTAACGGCACGGCAAGAGTATT
TCTGTCTGCTTCTAAAATTATAGGGCATCTGATGCCATAAGATGGGACTAAAATCACTGCACGAAAACCA
TTTATTAGCTTACTAAATACAATACTCATCAGCCATTAGAAAATATACTCATGAAGGGAAAGTTTGAACT
GTCTGAATTCATGCTGGCTAAAAAACACAACACTATGTCAATTAAATTAGTTAATCATAGGGGTCAAAAT
TAGAACACTTTGAAGGGCACGCATAGTTGGAAGGCCTGTCTTGTGGAGCATACGAATTGACAGGAGCAGA
GTCCCTATAAAAACCTCAAAGGGTGCGTGAAGATAGTATGCCTACCAGCATACTCATTGCTTCCCTAATA
TACCTGCTACTAATACCAAAGGCTGCCATGAGATTCACTAAACAATTCCAATTTGGTTGTTTGGCCTTGC
TCTTCATTTTGGGAGCTTGGCCTTCTAAATCCACAGCTCGAACCCTCCTGG
Sequence ID: 65
Sequence Length: 3000
Sequence Type: DNA
Organism: Poplar sp.
TGACGAAACCCAAACTCCTAAAGAAATTTAGATTCAACAATCCAAAATAATATATATAGATTCAAGAAGT
AATAAAAAATAAAAAATACGAATATGAAACTATGAATAGCAAAATGAATTTGTTCTAAATATAAATGACA
CGGAGATACAATTTTTTTTTTTATGAGAATAAGAAAACTAATGAAATAAAACTGTTATGGTCTCCTCAAT
ATGATGTGGCATGCATTCATAGACATCAAATCACACCAAACACTATTAAATTTATTTTGTCCCATGGAAA
AAGCTAGAAACAAGGTAGTGTTTATCAATAATTACCTTATTGTCTTTATTCAACGACATCAACTTGTAAG
GCGAAGTATAACTTTCAGTTGATAAATGAAGTTTCCTCATTGCCTCTGTAGACATCACATTCTAACAACT
ATCACTATATATTATTTGGCTATAAAATTTATTTATTTTATGGTGTATATATAATGAAAAATATTAGTAC
ATCATCAATCTTCTTCTGACTCACCCTTGGGTATCAACAACTCTTCTTGATAACAAAGGTAGTACCTCTA
TCTCCCAGTAAAATCTCCCCATCATTATTTGATCCATCGTTGTAGGCATGATTAGTTTTGTCCATAGGCT
TCTCTATCAACAAATTCCTTCCTAGATGACTACATGTTTTGTTGTACTCGGTAGCTCGATGCCCTAGTTC
ATCATATCTAAAGTAATGAATTCTAAAACCATCATTAATTGTCAATTCAACTTCGATCTAACACCCTTAC
CTCTTAATTCATTCTTAAAATTCTTAAGTTTGGACTTAATTGTCAATCTAAATTTTTCCCTAGGTTGCTA
ATCTTTAATTGATGATTTCCCCTTCTATAATGGTTAGCTAGTTTGTGGTGACAAAAATGACTTATACTCA
TTAAACAATTCATATAATGAATCTCTAATTTTGAGTAACATTTTCATAATACCATCATCACCATAAAAAA
AAAAAACTCTAGATACTATAATGTACGCCTAAGATCAAGAACAACCACAACTACAACATAAACAAGTATG
TTCATTTTATTAGTGCCTCCCTTATTCTTATCAAATCTTTCTTTCATATTATCGCCATCAAACACACACA
CAAATGTCTTCATGTTGCCTCAACTTGCAAAACACTAATCATCGCATTAACTTCATTAAAAAAAGGTAAA
TAAGAAATTAGAGATTTAATTTGAACACAATTTAATGGATCACAAGTTGATACATAAGGTTAATAAACTG
ATTTGATGAGTCAGTATTATGTATTTATAAATAAAAAAAATGTATCTATAGCAAACTAACAATATTGGTG
TTTATGAAGAAAAGAGAGATCATGTATTCGAATTCCATCAATTACACGAATTCAAACTTAGTATTGATCA
GACCATTCAGGTTTGATTGAATCGGATTAAATCTTTGTTTAAGTTAACTTTAAACCTAATCTAAGTTAAA
TTATGTGTTACTAAATTTCTAGATTAATTTGTTGAATTGTGTCGAATATAAAAACCATGCTCTCAAGACA
TCTCATAATCGAGTTTGAAGACTATGATTGGGTTAACCTAAATTATAAGCTTGACATCTCCAGTTCCACC
TGATTAATTTAAGAAGCCCATGGACCTTTAATGCATGAAAATTATATTTTGCTTATTGAATCCAAACTAA
ATACCGAACTGACAAAAAAAAAAGTTATTTCTGTTGTCTCCGTTCTAGCAACAAAGAGATGGGTGCGATT
ATATATATATATGGAGTACGCTGCCATTTCTTTCAGTAATTTCTTGGTTGCAATGCGAAAGCACTATGAA
ATTGTTAAGAAAATGTAGAGGAAGGTGCATTCTCCTTTCTTGATTCAAGATTATAGAAGTTATTATTCTT
ATTATACAGTAACCTAAAATAAACAATTCATTTGGTGAATCAATCGGCACGGTGAGAGCATTTGAAGCCA
AAATATTGGACAAAACTCATGCATTAGTTTAGCACATACACCACTTTATATATAGTAAAGCACATTCAAA
AGCAAACTATGATATGACAACCTAAAATAAACTCTGCCTTGGAGTGTGTTTATATATTCAAGTCTTCAAA
TATCTTTACGGAGAAGGAGGACATGTTATTAATTAGCGAAGAAATTAGGATGTCACCATTGGGTAGCCAT
GATGGATGTTAATTGTTGTGTCATGGCATTATTCTTATGCCATGTATTGATAAAAATATTGGTAATGAGT
AGTATAATTGACGTAAAAAATAGTGTATTGATAGAAATATTGGTGATGAGTAGAAAAAATAATTTGAAAT
TTTATATGTTTGGCTTCTAAGAACCCACAAAAAATACAAAAAAAAGAATGTGTCAAGACAACATTACACG
ATCATGAGTAGAAAATTCCTGCCATTTGGGCAGCTGAAAAATTTTTATTAAAAAAAAGCTTAGCAACATC
ACATGTCTTAAATCTAGACTCGATGCCTAAAAATCAGTGTATGTTTCTTGTTTCAAAGTGTTTATCTTGA
ACCTTAGTCACAGTGAACTAGTAGTACAATAACATGTCTCGAAGTCCTACCTCTCAGAGACAATTGCACT
AAAATGTTTGCTGATTGCTTTAGTTGATCTGATGCAAACCATTCCCATGATTTGAAGAAACGGCACGGTA
AAAGTGTCTTTGTTTGCTTCTGCTTGTAGATCATTTCATGCCAAAGAATAGGACGAAAATCCCCTGCTAA
ACCATTTTCTGGTTTACTTCATGCTCCATTCATAAGCCATACAAAAAAGAAGTCGGAATTAAAGGGAAAC
ATTTCGAACATCATCGGGGGTAAGAATCACAACATTTTCAAGGGCACGCAGACTTGAAAGGCAAGCCTCG
AAATATTATAAGCACAACGGTATGAGCAGATGCACTATATAAACCTCAAAAGATGCAAAGAGATATGTGT
GCTTGCCTGCTTTCTAATTCCTTCACTACTATAGTAGCTGCTACCACTGCCAAGTCTATC
Sequence ID: 66
Sequence Length: 3000
Sequence Type: DNA
Organism: Poplar sp.
ATCTACAAGCCAAAACATATGAGTCAGCCATTTTGAAGTGCTGCATAAAAGAAATCCAACTTCTACTAGC
TATCAATTTAGTGGAACATAAAAGTTCAAGCTGAGAATATAAATAAGATACATGTGCAATTGCAAATACA
TCATCAAACATAATAAGAAGTGTAAAGCTCAAGCTAACAAACATAAAAAAACCCAACAACTTTGGTTTGG
ATTCACCTTTGAGATGAATGTTTTGCTCGTATTCATCATAGAAAAAATAAAGCTATAGGTTGATGGTCCT
TTCAAATTTCCTAAGATAGTGGGAGAAAATACATATAAATTGAGGTATTAAAAATTTATGATATTTTAAA
AACTTTCAACATAATAGATTTCTCTCTCTTTCTATAATGGTAACATAGTTGAATAAAACTAGGAGACAAG
TTATTGCACAGCAGAAGTGTATGACATCAAATTAAGACTTGCATATTAAAAAAGTTTATGAATCATTGAG
TTAATATATGATGCATTTATCTTATTTATTTTCAAGTCTAGATAAAGAGTCTTTTAGTCTATGTGATGAG
TGAGGTTCATGTATATGAATTGAGTTGATATATGATTCATTTATCTCATTTATTTCAAATTGATATCAAA
AGTCTTTTAGTCTATGTAATGAATGAGGTTCATGTATGTTATTAAACCTATTCATGGTGGGTTGTTTATG
CTTAGTTAATAAATACTTCATTCCTCCTCGTTAAAGTAAGACATCTTATAATAAAAATAAATAGTTTATT
CTAATAAAAAGTGATTCTTCCATAATTATCTTATTTCATCTCTTTGGTGGGTTCCTTTAAGTGATGAGTT
GATTATTTTTTAGAGCTTACTTGTGTTTTCTCTTTTAAATCTTCATTAGTTCCAAGTCGATTATCATCGG
GATATAGTTTAACTAATTATTTTGATTTATATAATTGTAATGTGTGGTTCAATAAAAAATTGTTTTGGCA
CATTGTTTGCATAATAACATTATAGATGTTGTATACTAACATTGGTTATGAAAAATATATTAGAAAAGGA
CACGTTCCTTGTCTATCAAGCTTTAAAGATCTTATACATCACAATAAATAATTGAATAAATAAAATAAAT
TTAATACATAAACATATCCTCAAGCATTGTAAAGAAAAGTTGAGAAGATATCACATCACAAGAAATTTCA
ATTGAGATTAATAATCAACATAAAGCCTGTAGATTTTTATCCCCTCATAGTAGATTTTGAGCTAGAACAA
TTAATGTTTAATAACGATTCAAAATCTTTAACTACTGATTTAGCATGAGCATATATACATGGTTGACTTG
AAAATGCATTTGATATAGGACAAAGTGAAAATTAAAAGAAATAAATTTGGAGAAAGAATAAGCTTAGAAT
TAAAGGAAATGAGCTTAAGAAAAGAAATAAAAGAGTTAAGGTAAAGAGGAAAATGGGGGGATAGAAATGT
TTCCTCCTCAGTAAATTTTTATTAAAATTCTAATTAAAATAAATAATTGGATTTACAGTAAACTAAATAA
AATATTCAATAATAATTAAATCAAACTTAACAAATAAATCCAAATAAAATTCAATATAACCCATTAAATA
AAATATTTAAAAATAACAAAATTAAGCTCAATAAATAATCCCAAATATAATTCAATAACATAAAGGTTTG
ATTATCTTCCATCATCATAGATTATATGGATATATGAACATGTCTCGAATTTGATGTTACTATCAACACC
TATTTATCTTGAACCGATTTTCTTCTACAAACTCCCGTGTGAACCACGTCCATTGTGAAAGGATATGCAA
GCTGCACAATTCGTTAAGAGAGTTGTAGATTCGAAAGGATCCCACTTGCAGACAATGAGTAAATGATAAA
TCTCTCTCTTCTGTTTTTTTTTTTCCTAATAAGCACGACGATGCCATTAATTGACACTTAGCTTAATGAG
CTAGCAAGAAATAGGGACACGGATTATTCTCTTGAATCCATCTTCATTCTGTCTATAGCTCCACTACTGG
AGTAAAGGGAAACCATCTTACCTCTCTTGCTTTCTAGTTTTTATTTAATTAATCATTTCCAAAATCAACA
AAAAGATTTCTTTGCACGTTTGGTATATGTAACAACCAAAAACTCAGGTCAAGGAACAATTGAAGAAAAT
TATGTTTTGAAGAATAAGCTCAGGTCAAGGGATTCCAATGTGTAGCTTATGTTTAAATTTTATGATTGTG
CATCTGCATTAGTAATGATGAAAAGTTTCAATCAGAAAAAACCTGCATTTTCTTTTCCACAAAGTCTTGT
CGATCCCTGCATGTCGTGCGAACCAAACTGGTTTCAGGATAAAGTCCTACGCGTACCTCTTCAAGGAACT
TGTTTCGGCTGGCATAGGAAAATGGAACTAGCAAAAAAAGGTAGATTGCTAAAATGTTTAAATTCAATAT
GTCAAGGGGTACTCTTTCTGAAAGAGATGACACATTAAGTACGGCATATAGGCTCAGGCTCACTGATTAT
TATTGTTATTTTGCTTGAATTCATGCTTAACACTCCAATATTGAACGTAACTTGAACAATTAGTTGGATA
ACTCACAAGTAAAAGGAAAAATAAGCATTGCAGAACAATACAAGTGCTACAAAATAAAATATGAGAAGTG
CAGACAACGCAGCAGCGTCCAAATTTTGTGTCAGGATCATACACAACGTGCCAGATTCACCAGGTTATTT
GCTTCCACATTGTCAGAATTGAAGCCATGGTGTGAATGCTGTCTGAGAGAGATCTTTAAGCAGACCAATG
CAAGTACTATAAATACATGTAATTCACGAATGACTAGTGCAATATCATCACATCCTACAATACTTGCCTA
TAGTCACAATCTTGCACACTTCAGCAGAATGGCTTTTATACCAGAAAACAAACTAATCTTTGCAGTGGTC
TTACTTCTTGGGCTCTGGACTTCTCATGTCTGGTCACGCTCTCTGTATGAGGCTTCCATG
Sequence ID: 67
Sequence Length: 3000
Sequence Type: DNA
Organism: Poplar sp.
GGCAAAAACAAGCCTTACAAGGTAACCTCTCCACTCCATTTACTTAATCAATCATTTACATTCTTGCTCT
CTCTCTCCCCGTAAATTATTTCTCTCAACATTCATGTTTAGAAGAAGATTCGGGATGTTTTTAGTTCAAG
AAAGAGGTCAGTGAGGAAGGAATATGAGCAGCTTGCTGTACAGTTCAGAAGTGATCCAAAATCCAATCAA
GAAGAGAGTAAAACAAGTTTAATGGCAACTCCGTCTATAAAGGAAGCAAAAAGATCCTCATCTCATGATC
CCTCTGAATCTGAATGGGAGCTTGTCTAGATACCAGCAGTGTTTAGTATTAGTAACACGTCCGTACGTGT
ATATAAATGTTGAATGGGGTGATTAGGATGTTGTGCCAGATGTTAATATTTCTCCCAACCTTTATTCCCC
TTCTTTGCATACTTTCTTCTCTTCCCGAGTGCTGAAGTCGGTAAACGGCAGAGAAAAAAAAACCACCCTG
ATCTATAATGCAGAAATTTGTGAAGTTATATTCAGTTATTTTATGATGTCCTCACATCATGGGGACACAA
GTATTTACCTTGTATGACCTGTGAGTATTGTGCATGCCTTGAGTTCCAAGCCAAACCACTTGAAGGAATT
GATTATTTCCTTCCTCCATGAAGTTTCAGTTGTTTTAAGAGCTGCAAGATTTGCTACATTTGAATTTCTT
GAAATTTGTTGTTAGTAATTCTAAAACCAAGGCACACTGCAACTCTGAAGGATACGTAGATGATTGTAGG
CAGCTGATGAAGATAGGGCAGACAATAACAAGTTAACTGATCTGATAATAGTAAACCAAGGCACATCACA
ACTCTTGCTGAAGGTCAAACAACCAAATGTGAGGAAATTGTAGTGTCCAAGACCAAGGATACATGCAAGA
GCTTGTTCCATGTATCACGATGAGCCTTTGATTTTTCTGTTGCAGATCAGTTTTCAAAAGCTTGTGCTGC
TTTCTTGCATACAAAGCTGGATGTGCATCGCTTCTATACTCTTGATAGCTTGGTATTGTTCAGGTATCTC
ACTGGTATCATCATGCTTCCAATTGTTTTCTCAATAATTTCTTTTGCTGGGTCAGGAAATGCACACATAG
GATTCAACCATGATGGGTTGTGTTTTATTGCAACACTGGTGTTGTGGTGATATGCCACAGAAAACGATGG
TTGTTTTGGTCGCATCAAGGTGGCGAATGATCCAACAAGGCCATGTCCTATGCCTTTATTGAATGCAGAT
TCATTCATTTCCTCTGCTAATTTTCCTTTGTATTGGAACAAATCCCACCTGCAAAAGTTGACATCCACTT
CGACATTATTTGTCTTTCAAATTCCACAAGTTGACTAACCTTGTCATTATAGTTTTACACGAAACTTATG
GCTTGAGCTCCCCACTGTAAACCCACCAAGTCATGGCCATGGTGAAAACCATGGCATCGTCTCCCCGCCA
CATTTGGGCCAAGGGCGACAGTTTGTCAAGAAGCCTTAGAACTCTGCTCCCGTTTCTTGCTTGTGTTTCC
CTAAAATGGGCTCAACAAAACTCCGGTAACAGGAGTAAAATCCTATGTTTCAAGTTTTTCTTAAGTTGAT
TCATGGTTATAATTCAACTAATAGAATCACTAGAGGATTAGAAACAGAGTAAAATATTGTAATCTTACCT
TTGCTTTGAAGACCTTATAGACACAGCCTCCGTAAATATGAGCTCAAGAAGAAGGTATGGCAGAATGAAG
AAGGCAAGCTAGAGGTTCCCATTGGTTTCTGTTGAGGGAATTTCCAACTATTATCACCATCTTTCATCTT
AAGTCTCTCCAACATGTCCATGCCATTAAACATTGAATACAAATCTTTGTTAAAAAGAACACTAAACATG
CACTTGTTTATATATATATATAAGCTGAAGGACTGAAAACACTTGTTTTTAATAAGCCAGAAAATTGGCT
TAAAACACCTATCATCAAGGAGAAAAACTAAAAGAGTGAAAAAAAGAACAGAAGGCCTAAAACAAAAGGA
AAGCATACCAATGCTTGTAGATAACAATTTAAGCATCAGATTGCAGCAAACAATTAACCAAAGTATAAAC
ACATCTAAATGATAAATTAAATCTTTTTAGTATAGTGTTTAACATTCTCAGGAAAAGAAAACATTAATAA
GTTCGGTTGAAGAGATAAATTACAACCGATACTCCAAACTTTTAATGCTCTAAACCCACAACACTTTTAA
TACTCCTAGGATAGCATTTGATTATTGCTTCGAAATAAAAACAAAGGGGACAAATGAGGCATGCATCTCT
TATATTTCATGTTTTAAAATTATATAAACGTATTTTAAAACTATCTTATAGATGGATTTATTTTCAAAGT
AAAAGAAATTATTTTTTTTAATGCTACCCTATGAAAGAAATTACAACACTTTTAAGGCGAGTCATTTGTC
CTCTATGATGGCCAAGAAAAGGAAGAAATTAGTATTTTGATTGCATTTATTATCTACTACGAGGATTGAA
GATCAGTGTAATATTGATGACTTCCAGACATGCTTCACAACTATTTTTAGACACTTCAATTGAAGTTAGT
ATAAGCTGCCTATGAATTTGAACACAGTTAACAATATTAGAGGCAGCATGATCCTGCCAAGACTAAAGAC
TACAATTACTGTCAATTCAAATATTAAATAATCAAAAATCATTTCCTTTAGGTTATATTTTTTGTTTTGT
ACAATAAAAACACATTTAGATAGTTGAAAAAATATTTAGCCATATATCAGAGCAGACTGCACGGTACACT
ACTACCAGGCCATCTAAATCAAATGCAATTTGCCGGTTGATCTAAGCATGGGAGGTGTCTTCATCTTCCT
AAACAAGTGCATATAGATTCATAAAGCAATCAAACAGGAACATTAGCATACTATATATAGAGGTTTTCTG
CATATGTGCAGCTCATTCATTTATAGTTCAAGCAGATTAACTACATCATCTAGATAAACC
Sequence ID: 68
Sequence Length: 3000
Sequence Type: DNA
Organism: Poplar sp.
TATTCCAAACAAAAGAATTCATTTAGCAAATCAAATCAATTCAATCTACTTAAAGAGATGAAATTAATTC
TAGTATAGAATTGGTTCCAAAGAGCTGTTAATGTTTGGTCTTAGTGTCCATGTGATTTTTTTCCCCTCAT
AATTTACAAAGTTGCTCACAGATATAGATCTCTATGACATTGAAAAATGGAGATTAGGATAAGGTTTGAT
GAAAAACATATTTTACCTCCATAATAACTTTCAGAATTCTTAATCCTAGTTCGAGATGCTGCTGAGTTAA
ACTAGGATGATAAAAATGAAAAGTATCCAAGTACTACCATCTCCATAGCTGGTTGGGTGGTAAGAACACC
TGCCCTGCTCATTTTTCGAACTAGTCTGGGTTAAGTAAATGGATCCTTTGCCTCTATTAAGTTCTATTTT
CAAGCAAACCTTCTGCAAACTGATGTCATATCAAATCTTTTAACACATCAAATGGAAAATCTTTTGGTCT
ACTTCCACCCTTCCTAACTCCTACTTCAATCTGATCTATACACTTTCTCCCCAATGCACCCTTGGACTTA
TTTTGAACATGAACAAAACTATAACATTCGACCTCCCATAAGTTGAGTTTAACATGCATCGAATTTGCTT
CTAGATTTCTTAGATACAAAAACTCATCACTCAGTGATTAAAACATATGTGATTTATAGGCCGAAACTCA
TACCTGATACCCCTACTACTTCCTCCCCAGTCACAGTAGCTCACAACCAGCTTTTTCAGCTGCCATATAC
CTTTCCAAGCCATCTGACATTAGAAAACAATGAGCTAACAACAAAACTTACACAATAAAAACGCAAAATT
TTCTCATTAACAAATGAAAAATCTCTTTATCTTAAAGCATACAAAGTTACAAAAAACAAAACCAAACAAG
CAAGTGACGTGATTATTTCCCATCGAAACAAACACAAATTCCTAAGCCACTCCAATCCAAAATCAGCTTA
AAATCAAAAAATCCACATGAACAATGACATTTCCTCACTTCTACAAACACTCCAGAGTTATCATCTCTGA
ATACTAATCTGCTCTTCAAATGAAAGAAATAGAAAAGGGTCTCTTCAAATTATTAAAGCCGCCTTACACC
TTCATTAATTTGCACAACAAAATCACATAACAAGCAAAAGAAGAAAAAGGGTCTGTTAAAAACACAATCT
TTCAATCAATAAACAGACAGAAAGTCACTAAAAACCCAACATTACCATTCAATTAATAAAACCCATTAAA
TAAACAGAAAAAGATCAGATCTTTTGCTCTTTTTGCAGAAAAAAAATCCAAAAAGAAGCCAACTTCAGAA
AACCCATAAATCCAAAGAGAGCTACAAGGGTGAAAAAGACAGGTACTCAAAATGAAGCTTTGAGAGAAAC
TGACCTTAAGCTTTGTTGATGGGGCTGCAAGGGTTTTGCGGAGAAGAGGGACAGGGCGCTGCTTAGTGAA
GGATTTGTGGGGTTTTGGTGGCAGGCTGATTACAAAAACTTTATTTTTACCCCCATAGGCTTTTAATGTT
TCTCTTCTATCCTTATGGTCTACAATTTTCTAATGCTACTCCTATTGTTTCTAAGACGTTTCAATTTCAC
CCCTAAACATCAAATAGCTAATGAAATCTATCGATGAACCTACATTTGATTTTTTTCAACTTTCTTGTGA
TTTTAGATTGATTCGAAAACGAACCCCAAGTCATGAGCTCATTAAGTTAACTTGTACGTCACTAAATTTT
TAAGTTAATTTTTAGGTCACCGAGTTAATTTATATTAATTTTTTTATTATATAAAATTTTTAGATTAATT
CTTCGATAATTCTTACGGTAATCTTGACAAGTGTAGAGTGAAAATCAATTCATCCAATAATATAAGAGAA
GACAGTGGAGACATGGACGTGAACTCCAAATTAAAGATGAGATTTTCTGCTGGTAGCCCATTCTGGATTT
CCAGGTTTCACTGCATCTCAGCATGGCTAACTAAAAACGATGGCAAGTCTTTGCCAGATAAAGTTGTTCA
AAGAATTGTGAAAAAACTCCAGGATTGCAAAGTCGGCTGTGGTGGACTTCAAAGGATATATTTCGAAACA
TTTCTCCATTGTCTGTTCAGGCTAGGATGGAGTACCTGCAATTAGCCTCCTTGGAGGGCAAGAAACCTTT
GAATTGAGTAAAATTCTAGTGGGATGTGTCTGATCATAATGCAAAGGTTACATGAAATGCCCTTGGAATT
GCTAGGAATGTACGTACCCTATGATAAATGCCTCAAAATTCTGCGAATTTCAATGTATTTCCATCGCAAG
GTATCCGAGATGCTAAACACATCAACTTTCAGACAAGGTTTATGTTGAAGGGCCGAGCTTCTTTTACGTT
GCTCGAGTAACTGTAATGCAGTAGTATCTTTCATTTGAAGAATGAAAGGAACTGCAACATTTTCAGGGCA
AGTCATTTGTCTTCTATGATGGCCAAGAACAGGAAGAAGGAGGACTTTGGCTGCATTTATTATCTAGCTT
GAGGAGTGAAGATCAGTGTAAATATCAATGACATCCAGCCATGATTCTCAGCTATTTTTAGATACTTCAA
CTGAAGTTAGCATAAGCTGCCTGCGAATTTGAACACGGTTAACAAGCCTAGAGACAGCAGGATCCTGCCA
AGAATGAAGCCTCCAATTACTGTCAAGTCAATTATTAAATACTCAAAAAACATTTCCTTTAGGTTCTTTT
TTGTTTTGTACCATAAAAACACATTTAGATAGTTGAGAAGATATTTAGCCATGAATCAGAGCAGATTGCA
CGGGACACTACTACCTGGCCATCCAAATCAAATGCAATTTTCCGGTTACTCTAAGCATCCTGATCTTCCT
AAACAAGTGCTTATAGATTAATAAAGCAATCAAATAGGAACATTAGCATACTATATATAGAGGTTTGCTG
CATATGTGCAGCTCATTCATTTATAGTTAATACAGTTTAACTACATTTTATAAATAAACC
Sequence ID: 69
Sequence Length: 3000
Sequence Type: DNA
Organism: Poplar sp.
TGTAGCCACTAGTTGCAACAATTTTCTACCTTGCTCTTCTTGTTCTTGGCAGCAACCAGTTGCATTTTCG
CTTGAAAAATTGCAGGAACAAGACAAAAACTCCGAGCAACTTTTTGTTTGGAAGCAATCTGAACATCAAG
ATATGAACTTCTTTTCTTTTGAAATCTTACAAGCCCTACATAAACCTCCATCAAAACTACAAAAGAATTA
AAACCCCAAAATCCATCAGATCTTGTCAGACAAAAGAACCCATAGAAGAAATTGCTCTGTTTTTTTTTTT
TTTTTCCTGATACCAAGGTTTTCATGACATATCTCATAACTCTGAATTCCTGTTGATCTCCAAAACGTCA
GGCAACTCATTATACATCTTTTGACATTCCACATCAATCTCAAATGTTCCATTATTATAAACCCCATTGT
TCCCAGCTTCCGGAATTGTATGACCCATTATCATCCCCTTCATCCCAGCCCCATAACCACTGCATTCCTC
CCTCAACAGTATCCTGGTGCCAATTTTCCTCACAACTGCGTTGTCAGATTCTGCAATGCAGCTATCCTGG
CTCTAATACCACAAAAGAACGGGTTTAATACCAAGAAAGTCAAAATGAATCCATCAAATACATCCTCTTG
CTTTCCTAGTCCAACACCCTCACTCTTCATTTCATTACTTAATCTGCTGAACAATACCAATAAGCTAAAT
TCTCTACCTTCTCTAACCCTGTATTAATCACATTCCTCAAGTGGAAATGTATTCTACGAAAAAAATATTA
AAGGGCACCACCACACGAACATTATAAAGATAACTTTGATGAGGATGTCCAACATAGAAGATCAGTACAG
CATGGGATAGCAGAGTAGGAAAAACAAATAGTGATCCCAAGCTTAATAGAATCAGTATAAAGGGATTCAA
TTAATAATTATTCAATATAAAAGGTAGTTGTTAAACAAGAAAATTAAAAATAAAAACTAGTTTCTGGATA
ATTAAAAACAGTATAGATCAAATATTTTCCATCAGAACGTCCACACTAGCAGCGCTCCTTGACCACCTGC
AATAAGTTCCTCTTTTTCGCATGTTCCAATGCAGCATTACGCATCCCAAATCTAAACCTCCATTTCAGCT
ACTGCAGTGACAGTGGATGTGTTTTTGTCCACGGTATTTGACATCGAACGCTTAGTTATCGGCAGGCACC
ATCTTGTGCATATTTCCAATAGTAGCGTGACCAGTAGCAAAGTTAGTATTATACCACTGTAGGTAAGCCT
CCAAAATCTTGCGGCGTGCAATACGTCAAATCCTTTGTATATATTGAATATGCTTAGGATAAGTGTTGAG
CAACCCGCCAGGAAGTGGAACCAGTTGAAGAAGGGACGATACTTGCTATCTTTGTCAGGTCTGACCAGAC
CACCAAACACCTGCGCTGTTGCAAGACAGAAGAGGACAATGCCGATGATTTTGTGACAACTATGTTCAAT
TCCATGAGACCTTATGCCAAGAAATATTCCAGTCCCAAATCTAGACAGACCACCAAGAATATAGGCCAGA
AGTTGACAACTGACATGCAAGTAGAACCATAAAGGGCCTGCAGATTCGAACCTTTTCAAGTATCTTGCAA
TGACGGCCCCAACAGGCATTAGAATACCCCAGCTTACTGTGTTCAATATTCCATGGACATTTTTCAGTGT
TGTTGAAGAACTTCTTGTCGCTTTAATCCTCCCTGAAAGGAAGTCCAAACTCCCCATGGATTTGACGTTG
GGACTGGATGGAGCAACACTATGCATCATTGGAGTGTTTTCAGACATTGGGCCTACTTGCCAGAGATGAT
TGACTGTGCTGATGTTTCCATGGAGCTCTAAGCTTGCATAGATTATCATCTCATTGTTCTGATTAGTAGC
GGACAAGTCCAAGACAGGAAAGCTAAGATTTCCTTGTTCCAATCGCGTTCCATAACTTGTTATAGGCGAA
GTATAGACCGCAAGACTTCCATCCGTTCTCTGAAAAGAAACGATTGCTTGGGAACCAATCATCCCTCCTG
AAGTTGGATTGATAGCCCAAGCAATCCATCTGCGATCGGTCACGCCAGTATGCCTGAAGGCAACCTCAAC
TCTGCTGGATAATGGATGGTAGTTCCAGTGAAGAGAGGAACTCAAAACAGGCAAGTCGCTGCAAGAAGAG
AACTGTTTGTTGTTTGAAAATTTATAGGTCGTGCATGGTTGTTGTTGTGCTATGCATGACAATGTGCAGA
AAGAAAGAAAGATGGCGACCAGAAAAATCACAGAACGGGCCATGTTTATGCAACAAAAGGGCTTGAAAGA
AGAAAGATCGGTGATGACTAGAGACTACGGAGCACGGGGAAGGAATTGTTTTTGGATAGAGAATTGTAAG
GCTGATTGAGTGAATATATAGGGATCTTGTCTTCCGTTTGCGACTCGGAAAAATATTTTGATTGCTTCGG
TTTCTTGAAGGAAGTAATGTCCGTCTTATAGTCTGAAAAGCAATAGAGAGATATTTCAGTAGTCGGTCTT
TCCTTTTTTTTCCAATCGGATTAGCAATTTATTATTTTAAATAGTTTTTTTTTTTTTACTTTGCCTCAAT
AAAGGAAAATATTTAGCCATATATCAGAGCAGACTGCACGGTACACTACTACCAGGCCATCTAAATCAAA
TGCAATTTGCCGGTTGATCTAAGCACGGGAGGTGTCTTCATCTTCCTAAACAAGTGCACATAGATTCATA
AAGCAATCAAACACGAACATTAGCATACTATATATAGAGGTTTTCTGCGTATGTGCAGCTCATTCATTTC
TAGTTATAGCAGATTAACTACATCATCTAGATAAACCATGGTTTCGATATGCAAAAGGAATCAAACACGA
ACATTAGCATACTATATATAGAGGTTTTCTGCGTATGTGCAGCTCATTCATTTCTAGTTCTAGCAGATTA
ACTACATCATCTAGATAAACCATGGTTTCGATATGCAAAAGGCTATGTTTCTTCGCATTC
Sequence ID: 70
Sequence Length: 3000
Sequence Type: DNA
Organism: Poplar sp.
ATACAAAAACAATTTCAATTTCTCAACAGGGCAATGAGTCAGATGAGGTGCTCGTGAAGGCATCATTTCT
TGCTGAATTACAGCGACGTGTTCTCAAAGCTGAAGCTGCTCTTAGAGAGAAAGAGGAGGAGAATGACGTC
CTTCACCAACGGCTCCAACAGTATGAGAACCGTTGGTCAGAATATGAGTTGAAAATGAAGTCCATGGAAG
AAGTGTGGCAGAAACAGATGAGATCCCTACAATCCAGTCTCTCCATTGCAAAGAAGAGCCTAGCCATTGA
TGATTCTGAGAGAAATTCTGATGCATCTGTCAATGCAAGTGATGAGAGAGAGTTTAGCTGGGATACAGGA
AGCAACCATAGGGGTCAAGAAAGTAACAGTGCTAGACCAATGAGTGCAGGCTTGAGTGTTATAAGCCGTA
TGGCTGAAGAATTTGAGCAGAGGAGTCAAGTGTTTGGTGATGATGCCAAGTTCTTGGTAGAGGTAAAATC
AGGTCAGGTTGAAGCAAGTTTGAACCCTGACCGAGAGCTCAGAAGGTTGAAGCAGATGTTTGAAGCTTGG
AAGAAGGATTATGGATCGAGACTACGGGAAACAAAGGTGATTTTGAATAAGCTCGGAACTGAAGAAGGTG
CCCTTGACAGGGTGAAAAGGAAGTGGTGGGGAAGGAGGAACAGCACGAGATATACTTAGATTACTTTGTT
TGGTGGTTAGCTCCTGGCTATTTAACATCCGAAAATTATATAGCAGAGAAAAATTGTGATGACTTCTTTT
TGTACAAGCGATGTGGTGATGGCAGAACCTCCTGGTTCTTATCGATGCCTAAATTAAAATGTACATCATT
CTTTTTTATTATCACACAAGTTGAAGAAGCAATATTTTCTTCCCATGGCGGTGTCTATTTCCTGGTTATT
TTTTTTGGGGGATAATTATAGAAACCCTCACTTTCCTTCTATATTTTTATTAGTTATATTTTTTATCCTG
AAAATACATTATTGTTGAACCTACTGCAAGGTCTCTCCCTCACGTTGCACCCACACGCACTTAGAGTGCA
GCGAGCCTCCTTCAATCCCTAACCTGCATGGATATTAAACCCGGCCTGGGAGTTAGACCTGGTTTGATCG
AATCTTGGGTTTTATGGGTCAATTCAGAAAAATTAAAAAAAATTAAAATTTTAATATTTTATATGAAAAG
ATTAAAAAAAATCCATGTAGATATCGATTATATATATTATTAATAATTATCGAATGCTCAACCTAGATTT
CGGGGATGATGATGTGAATTCATAAGCTAGAATTTGATGATATTTATATTTTATTTATTACCTGTTAGCT
AAGATAATTATCTAAAAAAGAAAAATTCATTCTTTCATATCGTTTTGGATTGATATCCATTATGTTTGAA
AGAAACTGCTATCCCCACTCTTGTTCGCAAAGCTTGGTGCGCCAAAATTGACTTTTAAATTTTATGGTAT
ATAAAGCTGTAATATATATATATATATATATACATATATATATTCATTCGATAATATGTATACTACATTC
ATTACCTATTAAATAACATAACTATTTAAAAAACCATATTCATTCATGTCAGGTTCATATCATTTATTCA
TTATCTTCGGTTTTTCTTCTTCTTCTTAATTTTGCATGTGCCTAAGCCTTGAATGACATAACTCAGTTTG
GCTGACTTTCATGGTTGGGAATGTGAGTGTATACTGCCAACCTAGTTTTTAACAGCTAAGTGTACCTCTG
ACCAATGACTTCTTTTTTGCCTTGGAGTGGATCTCAAAGGATGGTATGAAGAGTCAGGTAATTCCTATGT
TGATCATGGATCAAAGAGTGGCTTTGGGTAGGATCTATAAGAAGGAATTCCTACTCTTTTCTAGTGATCT
GACTAATCCCACCATATATTGAAGTCTTCAAATTTCTTTACAAAGAAGAGGGTCTGTTATTGATGAAGAA
CTTAATATGTTACTGTTAGCTAGTCATGATGGATGTTGATTATTGTGTCATGACATGATTCTTATGCCAT
GCATGTATTGATGGAAATGTTGGTGATGAGTAGTATCATTGACATAGAAAATAGTGTATTGATGGAAATA
CGGGTAATGAGTAGTATTATTAGCGTAGAAAATAGTGTCTGTTCTACATAGAAAAACTCTTATACATGTA
GAAAAAATTATGTGCTTGAAATTTTATGTGCGCGGCTTATAAGAATCCACAAAAAAATACAAAGAAAATG
TGTGTCAATACAATATTAGACCATCTTAGTTGGTATCGAATGAGTAGAAAATTCCTGCCATTTGGGCAGC
TGAAAAATTATTATTAAAAAAAAGCTTAGCAACATCACATGTCTTAAATCTAGACTCAATGCCTAAAAAT
CAGTGTATGTTTCTTGTTTTAAAGTGTTTATCTTGAACCTTAGTCACAGTGAACTAGTAGAGTACAATAA
CATGTCTCCAAGTCCTACCTCTCAGAGACAATTGCACTAAAATGTTTGCTGATTGTCTTAGTTGATCTGA
TGTAAACCATTCCCATGATTTGAAGAAACGGCACGGTAAAAGTGTCTTTGTTTGCTTCTGCTTGTAGATC
ATTTCATGCCAAAGAATAGGACGAAAATCCCCTGCTAAACCATTTTCTGGTTTACTTCATGCTCCATTCA
TAAGCCATACAAAAAAGAAGTCGGAATTAAAGGGAAACATTTCGAACATCATCGGGGGTAAGAATCACAA
CATTTTCAAGGGCACGCAGACTTGAAAGGCAAGCCTTGAAATATTATAAGCACAACGGTATGAGCAGATG
CACTATATAAACCTCAAAAGATGCAAAGAGATATGTGTGCTTGCCTGCTTTCTAATTCCTTCACTACTAT
AGTAGCTGCTACCACTGCCAAGTCTATCATGAAGTTCACAAAACAATCCCAATTCATTTGTCTGGCCTTG
CTCTTCGTGTTGGGAGCTTGGCCTTCCAAATCTGTCGCTCGTACCCTCCAGGATGTGTCC
Sequence ID: 71
Sequence Length: 3000
Sequence Type: DNA
Organism: Poplar sp.
ACAATATGAGAAACTGAAAAGGTTCCAATTAAGTACTATGATGCACTCTCTCTAAACACGAGTAAGGGTT
AAGGCAATTTAGAGAAAAGTTAAGACAATCACAGAATGAATTTAGAATAGCATATGGCCTATGACCACTT
CGTTACCACCCTCTAGCAAAAAATTACAGACAATAGTATCACATTTGCATCTTTAAATTACGGCATTCAA
CATACTGCCAACTAACACCTAGCAGCAACACGTCAAATTCTAAGCATGAATTTGACTAATTGACATCAAA
AGGATCAGATTTTACAATGTAAGTGTCAGATACCACTAGCAAAACCAGAAAGCCTATGACTTTGGAAGTT
TGATCTCTTCCTTTCTCTTCAACCTCCTTTGTTCCTTCCAATCACCAACTTTCTCTGAAGCACTGCAATG
AGCTGATTTAGAATCCTTCCAGTCCTTACATGGAGCAGCACAATCACAAACATAGCAATAACACTGCAAT
CAAATCAAATCAGCATAATTAAAAACTAACAAAAACGAAACACAATCCTCATTAATAATTTACCAGTTCA
CAATAGCTCTCATGTGGGGTTTTATCAAATGGGTATTTAGTACAAAGATGCCTTGAGTGTGGATAATCTC
TACAAGCCACCTATACAGCAAAAAAAGAAAAATCCAATAAAGATCAAAACTTTATAACCTATCAACAACA
AAAAAAGCAAAACCCTATATCCTACTTAGCCAAAAATAAAATAAAGAATAAAAAAAGACCTGGCCTTTTT
CAGCAACAACAGAGAGGTCATCGACACCACCACCATCATCAGTGAAGGAGGAGACAGAGAGAGTGGAGAT
ACGATGAAGAGAAGTGTCAATATCAGAAGGGTCGAAATCAAGGATAAAGCAATCCTCAATCTCATCAAAC
TTTCTAATGTTTTCCGTGTTTGTTTTCTTCAAACAAAATATGGGTCTGATGGGAGTCCCATCTGGAGACG
GTGAAGATGTTATCTCAATTACGGCTGATTAATCTTTAACCTCCATGATTGTCTATTTGCCTTCCAGGAC
AATAATCAATACACTGGTAGTCTGGTACAACACCGAGCAAGTTTTAATCCAGAGCACGCAGACTCAAATT
TCAAAAACTAGAATATTGTACGAAAAGAGACCGTTGCTTTTCAAAGAAGGCGCGTATTGCCATAGAAGTT
TTTGTTGGGCTGAGGAAGTATTTGTTGTTGAGATTTAAGGCCTAATCTATTACAAAGTTAAGTCCAAAAC
AAAACAAAATCCTGGCTCGCATGGAACATAATTTTCGACAGAAAATGTTTTCGTGACATTGCAATATTGT
AGCCCATCATTTTATGGGGCAAAATAGCCAAGTTCTTTCCTAATTCTATAGATGGTGAGCCCCTGCGCTT
TGATGGCCGAGAGGCCCGAGACACATAGGATGAATCTATGCACTCGTACGTCGAGAGGACACTATACGCA
GAAATTATTTCCTCCAATGTATAAACTTCATCTGTTCAACATGCAACCCATGCACTATACAATTATTTAA
ATCTCACTTTTACGTAAGAAAAAAGAAGAAGAAAGAATACAACTTTTGATGTATTGATATAACTCCATGA
GACTACATATGCCACCACTCTTCTCTCTCTTTTTAACGATGAGAGATTGGTCAGATCGAGGGTGAAGGGC
TACCCAAACTCTCGTGGGGGCTAAGTTAGAAATGTCATGGGACTTTAGGAATGAATATTTGAAAAATCTT
CAAGGATTGGGGGGAAAGGGCTGGTAGTAACTCTCAAGGGATTAATATGAAAATAAGGCTAACTTTCTAG
ACAAGAAGTGAATTTTTAAGAATCTTGGAGGGTCATGCACGGAGTCATAATTGAGTTATGTGGATTGTCG
TGCAGGGGTACTTATGGGTGAATAAGTTTGTATCGAGTGTGTGGTGACCATCATGCTACCCAAGGTCTAT
GATATCCGCAGAAGCATGCAGGCAGCTTGGCGTGACATAAGCTTTGCTAATTACCTTTTAATCACTACTT
CATCACAAAACCTGTTATTAGAGCTTGAAATGCGCACCTAAGACCATAATTTATTGCATCTCATAATTAA
AGCAAAACCTACCAAATATGATGCGAAGTTGTTCAAGTCCTTCTACAAAGTCAACTTCGTACCTTGGGAC
AACACACCCTCGATAGAAGGTAATAATTAAACCATTATCTCTCTCGATCTTAGAATATTAGACATATATG
CAGGGGGTTGGCGTGCTTCCATTAATCTTGTAAAATAAGTGATTAGAACAGAGCTACATGCTGGGGTGTT
ATACGATATAAATGTAGAATAAGTGACAGAAATCTCCACTTGTCATATGAATTCTTCTAGGTTTTGGATT
AACAAAATATGGAAGCAGCTTGTTTGTTTAATTACCTCAAGCGGTACGTGCGTGGAGCTAGCTAGCTAGC
ATGATCTTAATTATTGAATGTATGTGGTAGGTAGGTTTTCGATTGATTGATAGCAACCTTGTTCTTAAGA
AAATATTGTAATGAGAATCCTTAGGAATTATAATATACTGCCATGTTGTTCTGACAAATAACAACATGGC
TGGCGTTTGATAGAGATGCAAAGAGCGACGACCTTATTTTAAAACATTTAATTACTTTGATGATCACCAT
ATCAAATAGCCTCCCGACCTAACCTTTTTTATACTTATACTTGGTCAAGATGATGCCACGATCGAAGACG
ACGACTACTACTATAATAAGAATAAGAATAGGAATAAGGATGAGGAGGAGGAGGCACTGTGCCATTTTAG
GCAGAGGTTGCTTAAGGGCAATGACAAGAGAGTAGGCACCAACTACAAGGTGGTTGAGTAGTACTTCCCC
ACTTCACCATATATATATACTGTACACCCCTGTCCTAGCGTTCCCATACCCTCCCAAAGCATTTCTTCTC
TTCTCTTACACCTTCTTCAACCCTCTGTTCCCTTAAAAGAATCGATCAATCTTGATCACG
Sequence ID: 72
Sequence Length: 3046
Sequence Type: DNA
Organism: Poplar sp.
TCATATAAGGTAGGCCACCTGTTGCATTCTTGCAGGTTTCGAATAAAATAATTACCGAGGGATATATTTT
TTCTGCTAGAAACCAAAGACTATTGTTAGAGTTGATTAGGAAGGTGATGATTTGAGAGAATATAAGGAAA
TTAATTAGATATGAAAGTCTCCAATTTGAAGTTGTTAACCCTATAGTGAAATTTTCGAGGAGCTTACTCG
TAATAATCATAATTATATTTGTACAAGATACAAGGCATATTGTGGTATTGCACTTAAGAGTAGATATAAT
TTTGTTTGAGAGTGTGGTTGCGATTGCTTTTTAAAATGTTTTTTGTATTAAAATACAATAAAATAATATT
TTTTTATTTTTAAAAAATTATTTTTGAGATCAGCGTATCAAAACGATACAAAATATAAAAAAATTAATTT
TTAACCAAAAAAAAATATAAATTTTAATGAAACGTGCATTCCCAAACCCTTTCTAGACAACCTTACAAAT
TGAATGGATAAAGGTAAATAATGATAATCTTCGCAACAAAAAATATATCAAAAAAGCAATATCAAATATG
AAGTGTTAAGCATTAATAATTCATATGACGTTGGTATTTTATTCTTCATATTTTTTTGCATGGGTTCAGA
AATTTTACATAAATATATCTTTACTTTGAACCGACAATTTAACTTAAAAAGAATTTTCTGTCAAAGAACC
ATCTCAACCTAAAAGTTTAAGCTATTGGGTTGAGATGGTTCTTTGACATGGTATCAGAACCTTGATGAGC
AAGTGATTTCAAGTTCGAATCTCATCATCCCTATTTATTTGATAAAAATTAAGTACAAGGTAATGTGGAC
CCATGCAAGTTTTAAGTTTAAATGACTTTTACTTAAAGGGGTGTGTTAGAGAATAATATAAATCATATCC
TGGAACTTCACATAATAGCTTAAACTATTGGGTTGAGATTGTTCTTTGACATCCTTTTTATTATATTTTT
CAAAGACATATATCCTAATCGATTTAATATATATCTCCCACCGGTAAATATGAACTGCCCATACGAAATT
GAAATCCTCAAAGTCTAGGGTCTTGTTGTTATCTTTTGACTTAGTTTATTCTTATCATATAAGATAGTTC
TTCAATTTATTTTTAAAAAAATTAATTGAAAAGTCATTTGATACAAATCTAATCATATTCTCTCTCTTTT
TCTTACAAAAAAAAATAAAATAGCAGGAAATTGTGTAACTAAAGACCCTATGACCCTATCCTTGCGAAAA
GAGAAGGGAAAAACTTGTGTAGTTGTGGGACCTCGTTTGTCACGTGTTTTGTCGGTGCAAGGAGAGGTTC
AGACATGAGGTAAGCACTTACGCAATTGGCTTAGGCAAAGACTTCGTCACCCACTTCTTGAAGTAGCCAA
TTGCATAACGCCATTGTAAACACAACTCTAATTGCCCAATTTTGTATGAATTATTCAGGAAACTGTAGTA
GATCTAATATTTTCTAGGAAAGATACATCTAATCATTCTTCAATTTTGTAAAATAATATAATACGAATAG
AGTTAATAATATTGTCGTTGATTGTTTTTATATTTAAAATTATATTTGAGTTCGTTTTAAAAATATATTT
AATTTAAAAAATATTAAATTAATATTTTTTTTTATGTTTTATGATAGTTTTAATATGCTATTGTAAAAAA
AACTTATTTTTAAATGAAAATACATTTAAAAAAAAATGTATATTAGATTTTTAAAATTTTTTAAATATGC
AAAAATAATAATAAAAATTTGGATTATGACAATTATATTCGAAGTATTTATTCTTTTGGGGAGGAGAAAT
TCAATTTTTAATACATAATTGAGAACAAGTTTTTTTCAAGTATGAGAGATTGACGATTGACGTAAAATAA
TTATTTGAGGAAATTATGAACCAAATTAACAAGATCAAATCTGAAACAAATTCTATAAAAAAACCTAGAA
GCATTGCATATGAAATATGAAGCTACTATTTTTTGTTTCAATTATTTTTCTAATTAATTTAAAATTTTAA
TTATTTATATCTACCTAACTTATGACTTTTAATTTAATTAATATTTTACTATTTAAAAATTCTAATACTA
GATGAATTTTATTAATTAGATAAGTTTTAATTAGAAATTTATTTTATAAAAAATTTTAGGACTAATATAA
ATAGAAATGTTTAGTATATTTTATGGAGATTAAAATTATTATTTAAATTTAATAAAAATATGAAAGAATG
TTTTTTTAAAGTTTTTCTATAGTTAGATCTCTGACTTTAAAGTTTAATAATTCTAGATTTATCTTTGCAA
TAAATTGTGTCATGAAAGTATAAATGATGGCTCGGCCTGGTACTTGGCAGCATGCCTCATTGCCCCGGTA
CTTTTCAAGCTACCCACAGTTCTGTATTTTTATAGAACCTTTTTGATTATTTACGTCATTTTTTAATTTT
AGGACGTTTGTTTTTTTGTTGTAAAAATATTTTTTTTATTTTAATTTAATATTTTTTTAGTATTTTTAAA
TTATTTTAATATGCTATATAAAAAATAATATTAAAAAAATAAAATAATATTATTTTAATTTAATTTTAAC
TACAGAAATATTATTTAGTTACATTATAAATATTTGTTTAAATTGGTGGCCTAGTCTTTTCTTAGTTGTA
CGTCGGTTATAAAAACTCTCACAGGTGGCCACAGTAGGAGGTCCCATTCCAGCTCATTAGTCTGTTTGGC
TCTAAGTTAAATCTGCTTTTGATTAAATTTCAATTTTTTTTTTTTGCTAAAATTAAGTGCGGTTTATACT
TTTTAGATTGTTTTGATATACTGATGTCAAAAATAATTTTTAAAAAATAAAAAAACATCATTGATATATA
TTTCAGCACGAAAAGCTATTTGAAAAGCAACCATTACCACACTGCGAAACACTCTCTAAAAAGATTTTCC
ACCCATTTAATTCAAAATTTTTCCATTATAAATAAAGTGAATGGTGGGAGTCCAATATGCGTCCAGTTTC
TATCTAAAAATCAACCAACCTCCTCCAAGAACGAAC
Sequence ID: 73
Sequence Length: 3000
Sequence Type: DNA
Organism: Poplar sp.
TTAAAATTAATATCATTTTCAAATTCTTTAGCTGGAGATGCTTTTACTTGGTTTATAAATTTGCCGCCAA
ATTCAGTCCAGAGTTGGAATGATATGTAAACAATAATCCAAGCTCGCATCTCTATAACAGAATCATAATT
TGTTTTGGCTAATTTGGTGAAATTGAAGCAATATCCTGAACAAATTGTTAAAAGATATTTAGATAGGTTC
ATGATGCGATCTTGGCTATGACATCAAAGAATTCATTAGGAGTGTCTATATAGTCTATTTTAAGGTTTAA
AACGAAGTGGATCCAAGAGAAGTTTGATGGGTTAAGTCAAGAGGTTTAAGTTCATGATATAATTTTTATT
TGGGCTAGAAATTATATTAGCAATACTTTCGTTTTTTTTATCACATTGAAAAAAAATAGATCTAATATTT
TTTTAACATTAAAATTAATTGTATCGGACTCGCAGCTTAGCTCATGCTAATTATGTAACAAAAGTAAATG
TCTTCGTCATCATTTGTAGTGGGTTAATTAAACTACTACGAGGGTTATTACATTAGTTTACGAAATTTGG
CATCATTTCGTAACCGATCATACCGATCACGTCAAGAGAAGTCTGACAGGTGGACAAAGCTTTTTCTATG
ATTGTACTAAATATTCTAATTATTCCATTTGTCAAGCTTTTTTTTCTAAACAGACTGCGGAAGAGTTGCG
TGTTGTGTCATATAACCTATTATTCTTTTGACTATTTTCATGATAGCTCTATTGATTGAAAAATTAAAGT
TCAAATTAAATGTTTTTAACTTGATTTTATACTAAAATATTTAAAAAATAATCTAGAAATGTTAATATAG
TCATTTACAACTACAAATGACATCTTCCTTTATTTCTTTGTTGTAGTTTACAAGAGTATGTTTGTTTTTG
TATTATTTTTTTATAATTTTTTTTATTTTAAATAAAATTTTTAATAATTTTATATTATTTTAATGTAATG
ATATTAGAAAGAATTTTTTTTTAAATTTTTTTAATATAATTTTAAATAAAAATCACTTTATAAACAACTA
ATATCACAATTTTAAAAAATAACTTATTGATTTATGCGTCAATCAATTGATTTAAGATGAAATGATTGAT
TGTTTGATTTTTTTATGTGGTTTTTTATATTTTAAAATGGGTTTTGATTATTTTTTTTGTATAATAGCTG
TTGTATTTTAAACAAATAAAATATAAATTTGGCAATTAAAATAAATAAAATTAAAAATAAATCATTCAAA
AAAATAAATGAAACGTTAAACACAAAATCTGCGGTTTTGTTTTAGTAATGACATAATTATATTTTTCTCT
ATTAATAGATTGTTGTAGCAATAAATACCACATTTATAAAAAAACAATACAGAGAAGAGATTATTAATTC
GTATTAATAAAATTAAAGATGAGGGAATCCTTGAGATAACTAATGGAGGGGTTACAATATTGCAAACAAA
GTTTTAGGGACCACAGTAAGAAAATATAAAGTATTGGAGTTTAGTTTTTATTGAATAATTTTTACATTGT
GGATTTAATTTTGCAAACTGACATGCTATGACCCCTTTTTGTCTGGTGAAACATGTTTCTTTTAAGGGTG
TGTTAGTTTTCTGGAAAATGACAGGTTACTTTTTAAATTTTCCCGTGTTTGTTTGTTATTATAAAAGTTG
ATCAACGAAAAATACTTTCCAGTCAAAGAAAAATTTGGCTTGGTTTCCAGAAAAGTGTTTTCCTTTTATT
TTGGGCGGAAAACAATTTCTCGAAGTTGTGAAAAATTTAGAAATGTCATATTATTTGCTGATTATATCAA
ATTTGGTCCTCAAACTTTTGATTGCTATATATATTTTGTTTTGAATATTTGTTTTTCAATTTCATCCCTT
AGAATTTAATTTTTATATTAACTTTGATCCTCATTTTTATAATTGTTATTTGCTTTTCCCTTATTATTTT
TTAATTGAAATTTTTTATCTATCAAATATGGTCCTCATTCTTTTGATTGTTACTTATTTTATTTGAAATA
ATTTATGAAATGGTAATTATTATTATTTTAATTTCTTCATCTTTTAATTTTTTTTTATTTTTTAGATTTG
ATCTCTATTATTTTCATTATTATTTATTTTATTTGAGATAATTTATGAAATTATATATTTTTTTCAATTT
CATTCTCATTCAACTTTTTAATTTGTAAGATTTGTTCCTCATTATTTTAATAAACTTGAAAAAAATTAAA
CATTAATAAGTTATTTTCCAGTTCATTTTCCATTACATAACCAAACACTGGAAAGTGTTTCCAACTTATT
TTTCATTACACTACCAAACATTGAAAAATAATTCACTTTTTCGGAATTCACTTTCCAAATAGAAACTACT
TTTCAGCAAAAAAAAAAAAAAAAGGGCTAAAATGCAACTAGATTCTTGATATCATTTAAAAGAAAATACA
AAAAAGAGAAACAAAAGCATTACAAGTGTGTTTTTTTTAGAAAATAAAAATCAAACATCTAAACAACATA
ATTTCTTCTAAAACACTAAAACTATTACATGTCGATCGCGTCAGACAACCTATTACTCTTTTGATTATTT
TCATGTTAGCTCTAATGAGTTCAAGTTAAATGTTTTTATATTTAAATATCTAAAAAAATATTATATAAAT
GTTAAAAAACTCATTTACAACTACAACACAATCTCTAATGAATGTATTAGTTAAACATTGTTCTTACTCT
AATGACTGTATTAGTTAAACATTGTTCTTACGACATTTTCTTTTATTTTTTTGTTATAGTTTACAAGAAT
AGTTTGTTTTTGTGTTATTTTTTTTTCAGTAATCTCGATTAAATCAGTTTTTCAGTTTTTTTTTACACCT
CTAATAAAAAGATTACTTCATTGTCAACTATTTCATCCAATCTTCCATTATAAATACTTTTGAAGCCGAA
TATTCATAAACCCATCCGGTTTCTTCTATCTAAAATTGATCGACATCCTCAAAAAACATT
Sequence ID: 74
Sequence Length: 3000
Sequence Type: DNA
Organism: Poplar sp.
TTATTTAGAAATATATTAAAATAATATTTTTTATTTTTAAAAAATTATTTTTAATATCAATATATTAAAA
AAAATATGTAAAAAAATTAAATATATTTTTTTAAAAAAATTTCATATAACGCGTGAGTGGTACGTTCCAT
TATGGTTGATAAAAAGTAAGGGTGATCATTTTCAGTTCGATTCAGTTTTTACCTATAAAAACAACCAAAC
CGAAAAAAAAAATTTATATAAAAAAAAACTAAAACCGAACTGAACCTGGTTCCAACCGACCGGTTTCGGT
TCGGTTCGGTTTCTATGTAAAAAACCGAAAAAACCTATATTGTTTTTAACATAAAAAAGCCACAAAATCA
ATCCCATCTTCATCACCAGAAGCCCCCACGACAGTGTTGAATCCATACCGGCCTTTTCTCAAGCAAATAG
CCTCCTACAGAACCACAAAAACACATCACGCTCTCTTACAATAATCAATCACTCTTCACTATCACAACCC
CAAAAACCTACATCACCGAGAACCATACTCTCAAATACAAACCATCACCGCCACAATAAACACTGTGCAG
TGCCCACTGCCACTTTCTTTATCCATTTTCCTTTCATAAAAAAAGAAAACTCAGCAGCTGCCAACAACCC
AAACCATAAAATCCACTAATCACCTGCAAATTAAAGAAATCTCACTGCTGCTGAGGTTTATGGGTGTTAT
TGGGATGATAGATCTGGAGATGATTGAAGAATGAAGATTGGAAGGTTAGGTGTGGCGTGTGGGAGCTTGG
GTTGGGGTGGTTAAACTTTGAAGAACGAAGAATTAATGTTGTGAAGAATTAATTGTGCTGTGTGCTATGG
AGAATTAATTGTGAGACGTGAGTGGACTTGTGAGCATAGTTATTAAACCCGGCCCGGGGTTGACCCGGTC
AAGGGGCCAGGTCTCGGGTTTCATGGGTCAACCCATGTCAACTCGGGTCAACCTGGATCAACCCGAAAAA
TTAAAAAAAATTAAAGTTTTAATATTTTATATGAAAAAATTAAGAAAAAATCCATGTAAATATAGACTAT
ATAAATTGTAAATAATGAAGTTTAAAAGAATATTTTAAAAAGTTTTTTATCCCATAATAAAAAGATATTA
TGTTAAGCTCTAAAAAGTTTTTTATCCCACATTGAAAAAAAAATCTTTTTTCTTGGGAACATAAAGTATA
TATACTAATAGGTTTCAAATCCCACATTGAAAAAAGATAGTTTTTTTTTTGGGAACATAGAGTATATATA
CTAATAGGTTTCAAATCACACATTGAAAAAACATAGTTTTTTTTCTTGAGAACATAGAGTATATATACTA
ATGGGTTTCAAATCTCATATTAAAAAGATATTATGTTATCCTTTTAAGTTTAAGTATTTAAACCAAAAGG
TTTTTTTTTTATCTCACATTGAAAAAACATAACTTTTTTCTTGGGAACATAGAGTATATATACTAATGGG
TTTCAAATCCCACATTTTAAAAAAAAAAAACCTGGGTCTCACCCGGGTCACGGGTTGACCTGTCAGGTCG
ACCGGGTTTGGCCGGGTCGTTGCACCGGGCAGTCTTTTGATAAAACTGGACCGGTCCAGCCCCCAGGTCG
ATCGGGTCCCGAGCCAACCCACCGGGCCGAGTTTAATAACTATGCTTGTGAGAGCTTGGGTGGGGGTAGT
TAAAGAACGAATAATTAATTGGGTGTAGAGTCTGTAGACTTTTGAGTGTTGTGGGAGGCTGTGCCGCTGT
GAGGATTGAAATGGTGTGGCTCGTGTGGGTTGTGTGGTGTGTGTTTGTGATTATGAAGATTGAGGAGTAT
TTATAGATTTTTTTTTTAATTTAAACCGGTTCGGTTCGGTTCAGTTTGGGTTGCTCGTTTAAGTATTATA
AAACCAAAACTGAATCGAACCAGAAGTTTTTCTAAATATTCTAATCGGTTTTTTTTATGGTTCAGTTTTT
TCGGTTAATTGTTTTTCACTTTTTTCAGTTTAATCGATTTTTTTGCTTACCCCTAATAAAAAGATTACTC
CATTGTCAACTATTTCTTCATCTTTTAATTTTTTAATTTTTTAGATTTGATCTCTATTATTTTGATTATT
ATTTATTTTATTTGAGATAATTTATGAATTTTTTTTTTCAATTTCATTCTCATTCAACTTTTTAATTTGT
AAGATTTGTTCCTTATTATTTTAATAAACTTGAAAAAAATTATACATTAATAAGTTATTTTTCAGTTTAT
TTTCCATGACATAACCAAACACTGGAAATTGTTTCCAACTTATTTTTCATTACACTACCAAACATTAAAA
AATAATTCACTTTCTCGAAATTCACTTTCCAAATAGAAACTACTTTTCAGCAAAAAAAAAAAGAAAAAAA
AAGAAGCTAAAATGCAACTAGATTCTTGATATCATTTAAAAGAAAATACAAAAAAGAGAAACCAAAGCAT
TACAAGTGCGTTTTTTTAGAAAAATAAAAATCAAACATCTAAACAACATAATTTCTTCTAAAACATTAAA
ACTATTACGTGTTGTGTCAGACAACTTATTATTCTTTTGATTATTTTCATGTTAGCTCTAATGAGTTCAA
GTTAAATGTTTTTATACTAAAATATCTAAAAATTATTATAGAAATGTTAAAAAACTCATTTACAACTACG
ACACAATCTTTAATGACTGTATTAGTTAAACATTGTTCTTACGACATTTTTTTTTATTTCTTTGTTGTAG
TTTACAAGATGTTTTTGCGTTTTTTTTTTTCAGTATCCTCGATTAAATCGGTTTTTCAGTTTTTTTTTTT
CACCTACAAAAAGATTACTCCATTGTCAACTATTTCATCCAATCTTCCATTATAAATACTTTTGAAGCTG
AATATTCATAAACCCATCCGGTTTCTTCTATCTAAAATTGATCGACATCCTCAAAAAACATTATGGCATC
TTCTATAGAAATCACGTCAGTCAAGTTGATGAAGCCAAAGATGAAAACTTTGGATATGCC
Sequence ID: 75
Sequence Length: 3075
Sequence Type: DNA
Organism: Poplar sp.
TTTTATTACTTTATAAAGTTTAATAACATAAATTTTCTATAAATTTATTTTTTAAACTACATGAGAAAAA
AATAAACTATAAAAAAAGTCAAGTTGAATTAAAAAAAAAGAAGACAATCCACCAAACTCGTAAATCAGGC
AACCTGAGTTACCTTGGTAAACTTGTAAACTACGCTAACCTCATATAAAGACAAAATAAAAAGAAGCAAA
TTACAAAGTTAAATTCTCTAACAATCTCAATTTTAAAAGATGAAATCAATAGAAACATATTTGAGAAAAA
GTTATCGTAATAAAAATTCAAAAACAAAAAACAAAACATTGTGGACTATAATATAATCAAGTTCGATTAG
GAAAAAAAAAAATACCCTACTAAACTCACGAATCGGGACAACCAGAGTTACCTTGTCAAACTCACAAATC
AGGTCATTGACTCCACAAAGTTTAATAACCTAGTTTTTTAAAATTATTTTTTATTTAACTAAACTTTTTA
AAAAATAGACCATACTCAATGCTAGATATTTCTTTGATACCAACTCGATGCTGAAATATTTTTTTGATAC
ATCAATAATTATATAAAAATATAAATTAAAATAAATTATCAACTCTAAATCCTCATAAATACATCGTATA
ATCATAAAAGGATTGAATTAAAAATAAAATCAATAACTTAATGAAAAAAAAGCATCAAAATGCAATCCAA
AATGTTAATGGGTGTTGAAAACAATATTTTATCTACATCTTTAACTTTATACTTAATAATAATTAATATT
TAATTTAATAAAATATTAATATTTTGTTCATAATTTAAAATGACCAGTCCATTTTTTTGTTCCAATAAAA
CAAAATACAATGCATCTTATTATCAATAAGAGTTGGTTTAGAAGATCGTGCAGCGTGGTTAAAACTATTT
ATATATATAATTATAGTTTTAAAATTATTTGATTAATCAATATATATTATAGTGTTACTTATTTGTTTTT
AAAATTTTAATTGAGAAAAAATTATAAATTATAATTGTTTTTAAACATGTTTTTTGAACCTTAAATTGCA
AACCGCAAAAGCTATCATATCAAACACACACCATGTATTTGATAATATAATCTATTGTATTTTTTAAATA
AAAATATATCAAATAATTTTTGTATTTTTAACAAAAAAATATTAAAACCATCAATAATCATATAAAAAAA
CAGTTCGAGAATAACTTTTAAAAAACAAGTTAAAAATTTATCATTTTCATTGTTTTGAAGTAGAAATAAA
TGCGAGGGGCTCGTAGTGGTTGTGATTCTTGTGAAAGCCAGTAAGTACCAAGGTCACTGTTTCCTAGGTT
AGAAAATAAGGGCACTCTCTCTTGTCGAGTACACTAAATTTATATCAGATTTTGAGATGGTTGTCATCAA
AGCGTGTCTGAAAAGGAGGAGCAGGAGACAGGTGGGAAACTTAAATATGGATTTGATGTCTGATTATTCC
TTCTACCTAAGATATTGATGGTTTTTTTTTTTTTTTTTAATTTTAGTTTAGAATATAATTTATAGTTTTC
TTTTAATTTATATTTAAAATTTAAAAATCATTGTACACCATAAAATTATGAAACCATTATTCACATAATA
CTCATTCTACATAATAAAATTTAAAATTTAAAAATTATGATTCACTATTTTTTTTAAATCGAGTTTTAAA
TTAAATTATGTGATAGTTATCCTGATGTGATCTTATTTATTAGATAAGTCAGAAAAAACATTAACTCAAT
AATGAAAAAAATAATTAAATAAAAATCTAAAATTAAATGATAAAATTGAAATAAAAAATCTAAAAATAGA
GAGTAAAAAAATCTAAAGAAAGTAAGAAACTCATATTAAATGATAAAATTAAAAAAAATAAAAAATAAGC
CAAAAAACTTTAATTACTTTAATTACATGATAAAAAATACATAAATTGATTTACTATCAATATAATACTG
AAAAATAAAGTTAAATAAAATCTTATATTAGAAAATAAAATAATAAAATAAATTTTATATTAAAAAATAA
AATTAAAAAAAATCCCCAATAACTAACTCTCAGAAAAGGCCATAACATAAACTATTTTTCTTTGCTTTTT
ACAAATGTCCAACCCAATACTCTATAGTTGTATTGATAATAAAAATAAAAATAACTAGATTTTTTATTAT
TTTATTTTTATCATCAAACTGAAATCATTAAATTAAAAATTAAAAATTAATGATGAGATTGGAAACTGTT
TCCAAATAATGCAAATCATTTAATTACAATAATGTTTCCATTTTTATCATATTTTAAACTAGACTATCAT
TCTATTTAAATTTAATAAAATTTAATTATAAACTAACTAGAAAAAACTATTTAGTCCATTTTATAAAACT
AGAAAAAATAATTTATAATTTATTCAATTTAATATATATAACAATCATATTTTTAAAAGAACATGTAAAA
ATATGGTGAAATTATTTTAAACCATAGATTTAAAACCTTATTTAGATAAACTTGTAAAAGAATTTAAAAA
ACTTTAAGTTTTTTTGAAATCAAAACAACATTTGTTTTAAATAAAAGAAATTCACAAAAAAGTCAAATGA
TTAGGCTCATAATGACCCGGTCAATCAGGTTTTTGAATGAGTTTTAAAACGTAAAAAATTCAATTGGAAT
AAAAAAAGGAGTAATAATTCAAATTTAAAAACAAAACATAACATAATCAATTAATTCTTAAAATAAAAAA
GGACTGCTAACTAGACACACGTCTCAATCCTCTTTAAGAAAAAGTAACAAGAACCGTAAAAAGCGAAAAT
GTGGCTTTCTGGACATGTATGATTGTTGTAGTTGATTTGTTTGTTTTAAAAAATTAAAATTTTTTTATTT
TAAATTATTTTAATGTAATAATATTAATGATAATTTTTAAAAGATTAAAAAAATTATTATTTTATTATAT
TAACGAATAAAAAATATTTTAAAAAACAACCGAAATTACTTTCTCGAATAACCTTTTATATATATACACA
CACGATCACTGGGTTATTGTTCTGCACTGAGTTTGAACTCATCAAGGAAGTGAAAAGCAGAGAGA
Sequence ID: 76
Sequence Length: 3000
Sequence Type: DNA
Organism: Poplar sp.
CATTTTCATCCATGTCTTCCACGAGAGCATGATGTTTGATCTAAGTGGTTAAACAAAAAGAATTCTTTCC
CAGTTTAATTTCTTTAATTTAAATCCTAAAAATCAACATTTAGAAAAACTGGTTTCTCTTGAACGATACC
ACTCCCATCTGTCTAAAAGATAATAGATTCTCACAGGGGTGATGATGATTTAGGGCAAGTAAATTGCCAG
CATAAAAATGATAGACTCCAGGAAGAAATTCCTTTTCCTTGTAGCCGTAAGCTTAAGAATGAATTCCGGG
GATGATCATGATCCCGTCACCTTGCTTTCATGCACAGGAGGAGATTCCGTGACTAGATGGTAACTGGGGG
CCATCAATTTGATTGGACTTGGAGATTTTTGTAGGGCTATAAGATTGTAAATATTTCTCTCGCATATCAT
ATCTTGTTTCTCGTAAATCTTTTTCTTTTTAAGAGTCATTCTGGAAATTATACGAACAGTTCATCGTCTA
CCTTTCGCAGTTAAAACGTTTGGAGTGCCCTTGAAGGTTTAATCATGGTCATGGGCATTTTCTAGTTGGG
CTAACTAAATGGAGGGGCAGGCTACTTCAGAGCAGAGCTACACTCGAGCGCAAAGGAGAAGGGGTAATCA
TTGAATCCAACTAATGGGATTCTATCAATAAGATAAATCATTTAAAGTGAGGTTGGAGTAGCAGTTATAG
GTTGCATATATTAACCTACGCCAATCATTTTATTTTGTAAAAACAATATTAAAATATATTTTTTTTCAAT
GTTAATAAATTTTGACAATCTTACATTGATCAATTTTATATATATATATTTTTTATAAAACCCAATATTT
ATTAGATTAATCTGCTGGGTTGCTCGGGTTTTAAAGATGATTAAAAAAAAAGAAGGGTTAGACTAAGACT
TTAATTGCATCGAATTAATTAGACTCGAACGTTTTCGGGGCTATTACTATTTTTATTTCTTTTATTACGC
ATGTAATTTTTCATTTTTCCTGTTGGAATTTACCTTTAATCAACTGCAAGGCTTAAAAGAATTTAATCTT
GCCCGTTCACTTCTAGGCTGGGCCGAGTGGCTGGGCAGGCTACCAATTTATAGACACCCCAAAAGCCCAC
TTCAGCGCACTCCTCCCACAAGTGTTCCCACAAAATGGGCCTGGCTAATATGGATCCAACTCCATGGGAT
CTTCTTACCAAAGGAAGATGATTTCCGCATACAATTGCACAGTAATGTTAATCTCAAGGAATATTCCTGT
GGAACTCTCTTTTTGAAAAACCCCAGGGAAGATAAATTATTAGTATGTTAGAAGGAAATAAATATATTTT
TCTGATATACATGATAATTATCTCATATATTGAAAAATGGATCCTGCTGAGAAATTCCATAAATTCAATA
GTAATATTAATTTAATTCACTTTTTTCAAAGAAAATCTCGTACATTAAATGAGGATCTCATGCATTGAGC
AAGTGAATCTGATACGTAAAGTTAGGATATCATATATTTAATAAGTGGATTCAGTGTCAGAGCCCCCAGC
AGCCACTGCTTAGCATTACCAGAACTATCAATTCGAGTAAAAAGCTAATTTTGTTCAATATTTTTTCTCA
AAATTATGTTCCAAATCAACGCTCCAGTCTAATGTTAAGTCCCATAAATCTGACGGTTGAATGTTTTTGT
AAGAGATTTCGACAAAACCTTTAAATATAATTACCTCGGTTCCTGACTAGTTCTTACAAGGAAAGATAAA
AACAAAAAGGAAAAAAGAATTGAAAAGAAAAGTAGATGAAACAGATAGGATGAGAGTTTTCTTCCCTTCT
TTCCACAACTGTCGCCTGCTGACATTTATCTCACAGGTATCACTGCCTCCCCGTTCAAGGCAAGAAATCT
AAGAGAGGAGCGTTGCTTGGGTCAAACATTATTCTGAAACCAAACACACGCGCATGAAATCGAGCATAGA
ACGTTCGTCAGGTCTATCACTTTTCTTCGGTTTGCTCAACAGATTATGCTGATTCGGTGTCGAATCCTCG
GGGGCCAAAAATGCCATAGAACTTCATCAGATGCAAGATCAATTAAACAAGCAACTAATGGAAAGAAGAG
GCAAAATAAAATGATGATCTCTTGAAATGGGAATTGGGAATATAGAATTCGGAAACAATCCCAGTATTTG
ACCTTTTCATTTTTAATAATATATTGGAGTACTTGTGTTTGGTAAATGGTATGTGCATCAGGAGAAGTTT
TTATTCCTTCCTGTAATCTGATTTCTGTTCCACTTCCTCTAATGGGAAGAGTGTATCCCATCCAGTTTTG
TTTGATAGGTGACGAGGACTGTGCACTTGTGCTAAAAAAAGCACAAATCATAAATGGAGCCAAGTAGTGC
AAACCGTGTTCTCAAAAAATTTTAAATTTTTTTTTGTTAAAATTTAATATGGTTTATATGTTTTGAATCG
TTTTGATGTGTTGATGTCAAAAATAATTTTTAAAAAATGAAAAAACATCATTGACATGCATTTCGATACG
AAAAGTTATTTGAAAAGCAACCGCTACCACACTGTCAAACACTCTCTACTGGTGTCGATAGCAATTTCAC
ATTTTATTTTTGGGTTTTAAAAGTATTTTTAAAAGAATTGATTTTTTTTTTATTTTGTATTAATATTTTT
TTGTGTTTTTAGATTATTTTAATGTGTTGATATTAAAAATATATTTTTTTAAAATATTATTTTAATACAT
TTTCAAATAAATTTTTTTAAAAATATTAATTACTACCACACTTCCATCCAGCACTACTGCTAAGTATGGA
AAGTCAAGTGAGTCTCCAAATGTGGCCATGGAATTCTACCACGTACCTTGAAGCTGTTACCTTCTCATAC
AAGCAATTTTCCTAACAAGATACCTTTTATAGATCCAGTAATCAACCTATCAGTACTATAAATGCACCCA
CTCACTAGGCAATGCATGTTGCCCCAAAGTCACATTTGTGCCAAACACCAACACACACAC
Sequence ID: 77
Sequence Length: 3092
Sequence Type: DNA
Organism: Poplar sp.
GTAATGGAGTTCGGAGTTTTATCAATTACAAACTATTTAATCCGAGAAATATTAATGGAGGTGGTATTAG
ATGTTCATGTAAGAGATGTAAATATAAAAAGTTTCTCGATACAGATGTTGTAACAATGCATCTTCTACAA
AAAGGGTTCATGAAGAGATACATGTGTTAGTTTACACATAGAGAACCATATGTTCCTCACGAGACCATAG
TAGAAATAATGGTTAGGTCAACTTCGAGTTCTAGCAACGTGCATGGAGTTGTAGATGATAATAGTAATCC
TTATAGGAATATGATTACACGGCTGCAATGTGAATGAGATGCGTTATGCTAGTCAATATTCAATCGTGGA
TGAAGAACCTAATCCAGATGCGACCAAGCTTTTTGATCTTTTGGAAGACTCCAATGAACCATTATAGGAT
GGGTGTATAAATTATAGTAAATTATCGATCCTTGCACAAGTATTCATCATCAAGTCAGATCATGGGTTGA
GTGAGACTGATTATTGAAAAAATTATTGAATGGGCGAGAAGCATTTTACCTAAAGGAAATAGGTTAAAAA
ATAACTTTTATGCTGCTAAATCCATAATGAAACCCCCCGGCCTAGGATACAGAAAATTGATATGTGTTCA
AACTTCTGCATGTTGTACTACCTTTAAAATACAAAGTTGACCGAATGTAGAACATGTGAGCATGCTCGTT
ATAAATCCAAAATTAGCAGGGAAATAACTCTTTTCGCACATAGAAAACTTATATACTTCTCAATCACACT
TAGACTTCAAATGATATTCATATCACCAAAAACTGTTGAGCACATGACATGACATCATTCACATGATGTG
GTGGATGGAGTGATAGTGCACTCTTCTAATGGTGAGGCCTGGAAACATTTTAATAGAGTGCATCCTTAAT
TTTTAATAGAATCAAGGAACGTGTGTCTTGGGTTATGTACAGACAGATTCAATCAATTCAGGTTATTTGT
TGCTCCTTATTCTTGTTGGTCGGTGATACTCATGATTTATAACTTGTCACCGAGGATGTGTATGAGGTTG
AAGTTCATGTTTTTATCTATGGTCATACTCAGTCCTAAAAGTTCGGGTCGAAATATAAATGGTTGTCTTT
GATTGTTGATCGATGAGTTGAAGTAGTTTTGGTTACTCGAGGCTTTGACTTATGATGTATCGAGGAAACA
TAATTTTGTTGCCACGCAAATTGGTGGCTCCGTTTGTTTCACATGCGAAGTGGATGGTAAGATTATTTTT
AATAACATCTATTTTTTATTTATTGTTTTTTTATAAATATATTTAACTTACAACAATTTTCTCTTGCTGG
CTACAGTTCTTGGACGTGAGTTAAGCCTGATGAAGCTTTTTATGAAAACGCGCGTGCGAAGTGATGACCT
CTAAAACCAGGTGCAGTAGCTCGTGGATAGTCAAGCTCAACATTTTGCGGTATGTTGGTTTTCAACCATT
TTTTAAGTTATTATTTTTTTGAATTTGCTAACTGTTTTCATGATACATATAACACCCAATTAAAGGAGAG
ATATGAGGACAATTCTTCAACCTGTCCGGATCTCGATCTGAATTTGTGATTGAAGGCAGGTTCGTCCGAT
GGACCCGATAGAAATCAGGTGTACGGTCTCTTTAACACTACGGCCAAGGACTTGCGGACAGCCTGCAATG
TTTCAGTTGTTGGATGCTAGTAATCGATTTGGAGCACTCAAACTCCAGAGTTCAAGGTGATTTTAGACCA
ACAAGTTCAAACTTGAACGACCTAACTTGTTTTTTATAATGAGCAACTCAATGTTGAGATGGCCGAACTT
AGCTGATTTATAATGAAGATGAGATCACAGATGGGTGGTATATGTGCCCTCTTTTATTGGGCTCACGGTC
CTTGTGAAGACCCTCCTCATCCTCCAGCGCCTCTATTCTAAATTAATTGTATTTGAACTTATAAATGTTT
AAATTTATAATAAATATTTTATTGTTATATTAATTTATTTTATTTTAATTATTATGTACTTATTTTTAAT
ATATATATATATTATTGACGGTGTTACCGAAGGATTAAGTTTGTTGGTATATTCTAGAGAGTTGAAAAAT
AATTACTGCAAATGTCACTCCCGCTATTTAATCACCGACAGAATTGCATATGGTCTTTCTGTTGGTTATA
TGTTAGATTCACCAATGAAAATACCGACGATGAAAAAAAATCATCGATGGAATTATATACAGTTTTTTTG
TTGGTAATATATTATATTCATCGATGAAAATATCAACAAAATGAAGCAGGTAAAATGAAAATATCAACAA
AATAAAAAAAAATTTAACGGGCTTTTGTGGTCCGTAAATCCATCAATAAACGTATTACTAATAAACTCAT
CGACAAACCACAAATGATCAATGAGAGGTTTTTTTATAGAACATTTTTATCCATTAATGTCGATATACTA
AAAGTATAAATAATGACAGAAAATTTGGTCGGTAGTGGTTATTTTGACCTCAACATGTGAGCTGGTTCAC
TATATATATAGGTGAAATTGTTCTGTCTTGTTTTCGTTTCATCTCCGTCCAGATTTTGTATGAGAGCTTA
TATTAAATCATAGTTGCTATTTTGTAAGAAAATCATACATGTTTTTTGTGAATTTGGCAATTAGAACTAT
GCTGATTCAAATATATTCGATAGGAGGTATATTTGGATGGCCTCCATGTGCCTGATCCAAAAATATCGAA
AAAAAGAATAGGAAAGTCATTAATTAATGGGCCTACCTTCTCTCCTTATTTATAGAAAGTCTACACTTGT
TTTCAACCTTTCACAAGAGAAAATATAAACTTATTTGATTTCAGCATTGAATAAGTAAACAAATTCTTTT
ACAAATTGGAGACGAAACCTTCCAAGATAATTTAAGATAATTAAATAAATAAAAAGTGGCCAACTTGTGA
AATGTTCGAGACAGGCCACGAAAAAAATCTATATAAAGCCCATGATATCCCTCTCAACTTAGCAGCATCG
GAAAGTTGCGAGGAGTAAAGTCTTGTGGATTACACAAAATACAGACTGAAAACATCCATAGGCACCAACA
CATAAACCATCC
Sequence ID: 78
Sequence Length: 3042
Sequence Type: DNA
Organism: Poplar sp.
TAAATGAATTGACTTTTAAAAGTAACATTTCATTGTTCCTTTCTAGGAATTTGAATATATTCCCACGCTT
GATGTTAAATATGTTTAAAAATATTTTTAGTTTGAAAAAAATATTAAATTAATATTTTTTTTAAAATATT
TTTTATTATTTTGACTTTTGGGTCTGGTGGTCAAGCCAAACCTAATAGCCTTAGGCCTGATAGTCATGAT
ACAACCACGACAGTTGGGTCTAGTAGCCAAGCCAGACTCAATAGCCCTATGTCTGGTGTCCATGTCACAC
CCAAGACAGTTGAGTCTGGCGGCCATGCCACACCCACGACAGTTGGGTCTATCGGCCAAGTCAGATCTAA
TAGCATTGAGTCTGGCATGACTGTCAGACCCAACACCTTTTGGCATAAAAGACAACAAAAACAATGCATT
CATGATGTTACAGTGTTGTCCACAGTACAAACATTTTATATCTATAATGTGGTCCATAAGGTATTGAGTC
TATATCCACAGTACCTGTATAGTGTTCTGGATCTGGAGGCCACGTCAGACCCAAGACGGTTGGGTCTAAT
GACTAAGTCGGATCCAAGTCTCTTGGGTCTGGCGGCCGAGCCAGACCTAACAACTTTTGGCATAAAAATA
GCAAAGACAACGCCCTCACGGTGCTACAGTGTCGTCCACAGTGCAAATACTTTATATCTACAGTGTAGCC
CACAATGCAATGAGTCTATGTTCATAGTACCTGCACAATGTTTTTCCCATGCATTTTAGAGTATAGTATA
ATTTGTCATATTAGTTGGTGTTTATGTGACAAAATATATCTGATAAATCTAAATTTAACGAGCCTAATGT
TGGGCATGCTGCCTAGCCAAAAGGAACGGACCAAGGTTGTTACGGGGCCCATACTAGATGTGACACGCCC
AACTAGGGTGTTGGGTGTCAGGCGAGCACCCTCATGGACTCGGGCCCAGCTACCACGGGGTTAGATAGCG
TGTTTGAGCCTATTTTTCACTCCTATCAGGTTCAAAAAACTTGTTTGAGCCCAACACTTCCTTGGAAATT
TTTCCAAGACCCAATGCGAGTCCATTGGTAATCTTTCGGGTCCCTCATGCGAGTCCTCCCAGTATTTTAT
TTTGATCCGATACATGTTAGTTTATATGGGTGAAATTACTCAGCAGTCCCTCTTCTCCATAAAAGGATAG
GATTCATGATCTATAAATACCATATGAATCCACCAAGTTCAAGGTTCACAATCTCTTCATTCTCAATATT
TTTGACACATATATTTTCGGAACCTATCTCTATCAAATATTATTGAGCTTTCTCTCTCTATAAAGTTACT
GACGTAAGCATCTAAAAGTTCCTGCGTCCATTAAAGGAGACATTTCACAGGTATTTGGCTTCCCATATCA
ATCTACAAGCCACCTTGCCTTTTTACATCAAACGGATAAGATTGCAAGAACTAAGTGATTAATCAATTAT
CTAACACATTAGACTTATTACTAAACTACTTGGATTTTTAAGATATTATCAATATCTCTTCTTATAAAAT
AAGTTTAAAACATAATATTCAGAAAATTAAAATTTAAAACTACCTTGTTTGAAAAAAAAAGTCGATGTTA
TATAAAGGAAAAAAAGTTGTTAGAAAAATTTAAAGATTTAAAAGGAATGTGATATTTACTAATTTTCCAT
CATGATATACAAAAATATGTTCATTTAATGGTAAAGAAAAAAAACAATGGTTCACATGCAAAACATGTGC
CAAGTACTACTGACGTGCAAGTTGTGCGAGCATAATTTTAGTCATGTGTAAAAACCAGCAAATGTCATCT
CCTAACAACGACAAAGTTAGAAATTATGTGCTGGTGGCTAGCAAATATATTAAGAAATATATATATATTT
TATGGATCGACTTATTAAAATGCTAAAATGTAGATTAAATAAAATTTGGCCCAAATGACGAAATATCTTG
TAACTTGTTTTGTTGAACTTGTATGTTTATTTAATTAAATGAAATGTTCAAAACATAGTTTTTTACCATA
TATATCTAGCTAGTATTTCAATACAAAAATATAATATAAACATGTTTAATTGAAGAAATAAATATATAAA
ATAAGTTTATTTCTTAAAAAAAATAAGTGAATTTTGTTGTAGATGTAATTTTTATTTTAATTATAGCGTT
TGATTTTTATCTTAAAAGAGTAATAAAAAACCAACCAAGTTTTTTTTTTTTTAAAAAAAAGGCAAAATGC
AAAGATAGCACTAGTATGTTATGATATATAAATTAATAATGAAAATACATAAAAAAATTTACTATTTAGA
ACCAGGGGTGATGGGACCTATACAGACTTAAAATATATTTTCATAACAATTAAAAATAAATAAAATCATG
GATAGGATGAAATTAAAAAAAAAAAATCTTTAGATTCTCAATATATTTTATAACTTTCATGTTGAAAAGG
CCAAACTAGGAGACTTTAATTGCATGGCTATCAATTTAACTAGAACTATTTTTATTCCTTTTATTATGCA
CGTAATTTCGCATTTTTCATGTTGAAATGTACTTTTAATCAATTGAAAGGCTTCAAAAATTTAATCATGC
ACATCCATGGGCTGGGCCTAAAACCCACTTTAGGTCACTACTCCTAGTCCTAGAAGTGTTCTCACAAAAT
GAGCCTGGCCCATTTCAATTCACCTCGATGGGATTTTCATCCACTATGTCCAATAAATGCAGTTTTTGAA
ATTTTTTAGGTAGTAATTTGATAAGATACATTTTTTTAGGAATAAGATTAGCATTACTACTCATAATTTA
TTGGGTATGCAGAGTAATTGGAGAACCAAAAATTGTTTCTCTGTACGACAGCGTTTTATAGATGCTGCTA
ATTCACTAATCTCTCTATATACATGCAGCCATGCAATGGTTATTGCCTGTTACCCCAAGAGTCACATTGT
GCCAAACACAAACCCATGGATTCTCTCCAATCTCTTCAAATTTCTCCGATGCTTTTTTTCATCTTGGTCT
CTCTATCTGTCTCCATAATTGTACTGATTCCG
Sequence ID: 79
Sequence Length: 2612
Sequence Type: DNA
Organism: Poplar sp.
CTATTTAACAACAAGGGACCATTTCGTGCATGCAAACATCAGGTAGGTGTTCGACACCTTGAGGAGAATTAATT
TATTATCTAAGTAGTAGTCACAATCACTACAACATTTAATAGTTTTACCGACATAATTTTTTCATCGGTGTAAG
ACACATATTTCATCGATAATTAATTTACCAACGAAATTACCGACAGAAATGCTTCTTCGGTGAATCTTTCATCC
GTAATTTTTTGTCCATCGGTAAATCCATTGGTAATAAAAAAAATATTATTACCAACGGATTTACTGACGGAACA
GACGCGTAAAAATAAATTACCCGCTTCATTCCGTTGGTATATCTCTCAAAAAATACCATCGGTAATTCTGTCGG
TAATTATTTAAAAAAATCCATTTTATAAAATTATAAAATAATTAAATTAACATAAATCAACACTCTATAATATA
TACTCAAAATGCTTGGAAAAAAGAATAAGAAAATCAACTCAAACAAATTTGCAACAAATAAAAATCTCACAGCA
ACATTTATACAATTATTAAGAACAAAAACAATTAAAAATAAAACAAAAAACAAATATAGTGAAAAAAATCATGG
AAAATGAAGAAAAAGGAAAAATCTTACCTTAATGTAGTTGCATGTGAAGCTAAGGAGAGAAAAAAAATTTCGTA
AAGCATATTAATTAAAAAAAAAAACTAAGAGGATAAAAGAAGAAAGAAGAAGACATACCTGAGCATGAAGGAGA
AGAGAAGGAGATGAGGATAGAGGAGAAGAGAAAGAAATAAATATTGATGTTTTTTACATATAGTGAAGAAGAAG
AAGAAGAAATGAGTCTGTCTCTTGTGAAATAAGGGGATTCAGGCTTTTTATTGAGGCGCGTTACCGACGGATAA
TTAAATATTAATATTTTTTAATTATTCTGTCGGTAATTCTGTCTGTAATATTTAATTTAAATTTTCAATTTCAT
AAAAAGTTTTCAGAAACCGCCAACAATCATCGATGATTTTTCAATCCGTTGGTGATTCCGTCGGTAATATTTAA
ATGAAAAATTTAAATTAATTGATTTTTTTCAGAAAACCACCAAATAACATCGACGACTTTTCAATCTGTCGGTG
ATTTTGTCTGTAAAGAACAACAATTAACAGTGCAATTGGAAAGTGAATAGTTCTAAAGCTCTCTGGAAAATACT
GACGGAATTATTCGTTGGTGATTCTCTTTGTAATTGACATGATGAACAGTGTTCACAGTTTACCAACGAATTTA
CCGACGGATTCCGTCGGTGATTCCCTTTGTAATTGACTTGATGAACAGTGTTTACAGTTTACCAACGAATTTAC
CGACGGATTTTACCGACGAAATAAATTTTGTTGGTAAAAATAACACGTCATCATTTTTTTTTTTGCTTTATTTT
AATTTTTTTCCCTACTGTAATTCCCTCGGTATTTCCGTTTGTATTTATCAATTTTCTAATGGTGAATTTTCTTT
AATTGTATCTTGATCTTAATAGAAAAATATAACAAGAAAAAAATTGGAGAACTAATTCGCTCGTTAATGAAATT
CATGTCCTGGTTAATGGGTGATTTGAGAAACTAATTTTTTGGTTAATGGGATCAATGAGCAATTGGGGAAACTA
AGTTTCTAGTGAATGAGATTAGTGTCCTAGTTAATGAACAATTAAATAACCAATGATTTAGTAATAAAATAAAA
TGATTTAGTAATAAAATTTATGAATCTTGATCGATGATGGCCAGCTGTTAGGTTTTATAATAAAGGATTACTTG
TGAAATGCTCAATCACGACTAGAGCACTAACAATAATTTTTGGGATTAAAAACATGTTAAAGATTGTGATTCAA
AATATTTTTAATTTACAAATAAATTAAAATATTATTTTTTAATTTTTAAAAATCATTTTAATTTGTTTCAGAAT
ATCAAAATGATATGAAAATATATAAAAAATAATTTTTAACTAAAAAACAAAAATTTAAAAATTTAAAAAAACAT
AATTTGCAGGTATTTTTAAACAGGGAAATAAGCTTTCAGGTCAACGTACAGAACAAAGATTAGAAATTGGTATC
TCAGCTGTTCCTGGCTTCCTACCAAAAGCTGAAATTAGAAAGAAAATAATGTTACCGTTTCCGTTCACTTGAGA
GCTATGATTAAAAAAACTGAATCAATCTGTCCTTTTCACTTAGTAGGATATGATTAAAAAAAACAAAAACAATT
TTTTGACTCTTTTTTTCCTCTAGTTTTTCATGCTTAAAGAGAAAAGCTAAATAAAAAGCCATTATACTATTTCT
ACCAAAACATGATTTATTGTAATAATTTTTTTGACTAATTTTCTAAATGAATTTTTAACATTAGAGTGCATATA
AACAAAAATAAAATCTCACTAAATTTGTTTTTCACAATTGATCCCTTTCTTCGAAAGAAAAAACAAGAAGCGAT
ACAAATAAAGACATTGAACTTATCCCCAGTTTGTCTTCTTCCTGTTATCATCTCCCTATTTACGACTATATATA
TATGTAGCATCTTCTCTATAAGAAGCAAGAGTTGGATTTAGGTTTGCTTTCACTAAGATAGAGCAAAGAACCCA
ACCTTAATAAATCAGACACAGC
Sequence ID: 80
Sequence Length: 3000
Sequence Type: DNA
Organism: Poplar sp.
AAACTTGATTATGTAAGGTAAATTAAAAACAATTAAGAATTGATGTCTAAATTGTAAATTCTAGGTTAGG
GTTACAAGAAAATTTAGGGGAAGTGAGAGATTGGCCTTGTTTGATGAAATTGGGATAGAAATAGACGAAA
GCAACTTAGAATAATAATTAAATGAAGAAAAATCATAGTCTTTTGGAAGCTAGTGGTGCCAGCCAAATAT
TAAAGAAAAATTAAAATAATACATGAATGTTGTTTGTTTGAGGTTATTGTAGCACGTGTTGAAATGTGGA
GAATATAATTTACAATAAATAGAAATCTTGTGTTTAATTTGTAATGGAAATATTGGTTATGCTTTGATTA
TGAATGTTGTCATTTTGTTGAGAATTGTAGGATTTTGTGTAATGTTGAAGTATTATGGAAAATTATACAA
ATGAGAAGAAAACTATTCATATTCCTTCTTTAATGTTACATTCGGCTAGAGAGAGAAAGAAAAGAGAAAT
TGTCCAGAACAAAAAATAGTCTAGCTATTTTGAGAAACGACTAGACCTATTTAAGAACACGATAAGACTA
TTTGTCAAAATGATTAGACCGTTTTTGTTATTGTCCAGTTTTGGAATTTTTTTTATCTTTTTCTAGTTTT
CTTCAGTTCTTTTGAGTTTGTTAAGGGAGATGGTAATCGTTTGATTGAATTTAGCATAAAATGTATTTTT
AATTATGATGGATGAAACACTTGATGTGAGGTTGTAACAATTATACATGGTAAAAATTTAGAATTTTCAA
TGCGATTAAATTGAGAATTCAAAATCTATATGGAGAATAAAATTGACCTTTATGGTGGATGAATTTACCA
ATGAAATCACCGACGGAAATGCTCCGTCGGTGAATCTTTCATCGGTAATTTTTTGTCCGTTACTAAATCT
GTTGGTAATAAAATAATATTATTACCGACGGATTTACGGACGAAACAGACGCGTAAAAAAAATTACCCGC
TTCATTCTGTTGGTATATCCCTCGAAATATACCATCGGTAATTATTTAAAAACATTTTAAAAAATCCATT
TTATAAAATTATAAAATAATTAAATTAACATAAATCAACACTCTATAATATATACTCAAAATGCTTGGAA
AAAAGAATAAGAAAATCAACTCAAACAAATTTGCAACAAATAAATAATCTCACAGCAACATTGATACAAT
TATTAAGAACAAAAACAATTAAAAATAAAATAAAAAACAAATATAGTGAAAACAATCATGAAAATGAAGA
CAAAAGAAAAATCTTACCTTAATGTAGTTGCATGTGAAGCTAAGGAGAGAGAGAAAATTTCGCAAAACAT
ATTAATTAAAAAACACTAAGAGGATAAAAGAAGAAAGAAGAAGAAGACATACCCGAGCATGGAGGAGAAC
AGAAGGAGATGATGATAGAAGAGAAGAGAAAGAAATAAATATTGATGTTTTTTACATATAGTGAAGAAGA
AGAAGAAGAAGAATGAGTCTCTCTTGTGAAATAAGGAGATTCAGGTTTTTTATTGGGGCTCGATAGTGAC
GGAATTACGGACGGATAATTAAATATTTTTTAATTATTTCGTCGGTAATTCTGTCTGTAATATTTAATTT
AAATTTTTAATTTCATAAAAAGTTTTCAGAAACCGCCTACAATCATCGATGATTTTAAAATTTAAAAAAA
CATTGTTTGCACTGCGTTTCTAAACATGCCCTAATCTTGTTTCTGTCCAAGTCGATGTCATTGCCCTTAC
AAAATAAAAGAAAAGGCAGTCAGCTTTCAGGTCATTTTCATTCCAGCAATGTTCAGTTAATTTTGCCATA
ATTAAGTTCCTGTCTCTTAATTCTTTTTTCCTTCGTAATTTATAGGAACCTGAAACATTGGTTTAGAGGA
TAAATTGTGTTTGGTAGAGTAGATATTATTTTCCCTTGTCTGAGAGGATGGAAAGGGAGCTACGAGAAAA
TTGTCGTCCATGACTGCCTTTTTTATCTCCCCGAAATGGATAGAATGAGGGAATGATGATATGGTACTTT
CTAGCTCTAACCCTTCGTTCTCCTGTAAATCAAAGCATACGATATAATTTTGTTATTTTTAATTCCACTC
TCTTTTTCTTTTTTAATTAATTAAATATAGGCAAGAACTGGACACTTAATTTACAATTATTTATAATTAC
GCTCTTCCACTTATATGAGAAAATTTTAAATATAGGTTTTTTGCGTTTTAAAAGCGATTTTAAACAAATT
AAAAAAATAATTGTTTTCTTTACTTTAAATTAATATTTTTTTTGGTGTTTTTAGATCATTTTGACGTGCT
GATGTCAAAAATAATTTTTAAAAAATAAAAACATATTATTTTAATATATTTCTAAATAAAAAAACAACCG
CAATCAAACTTTAATTCACGCGTAACCCATGTCAACGTACAAAACAAAGATTAGAAATCGGTATCTCAGC
TGTTCCTGGCTTCCAACCAAAAGCTGAAATTATAAAGAAAATAATGTTACAAGGGTCTCAATCTGTACTT
TTCACTTAGTAGGATATGATTAAGAAAAAAAAAACGACCTAAAGTAGCATCACTTAGTAGGATATTATCA
CTTAGTAGTTTAATTTATCATTACCGTTTCCGTTCACTTGAGAGCTGTTTATCTCTCTGGTCTAGCCTTA
GAGCAAATTGGATTTTCTAAATAGTTTTCTACCATATTAAAGTGCATATAAACAAAAATAAAATCTTACT
AAAATATGTGGTTTGGCTTTAGGTAGATAATAAAATCTCACTAAATTTGTTTTTCACAATTGATTCCTTT
CTTCAAAAGAAAAAACAAGAAGCGATACAAACAAAGACATTGAACTTATCCCCAGTTTGTTTTCTTCCTG
TTATCATGATCTCCCTAGTTACGACTATATATATGTGTAGCATCTTCTCTATATAAAGCAAGAGCTGGAT
TTAAGGTTTGCTTTCACTAAGATAGAGCATAGAGACCAACCTTAATATATTAGACATAGC
Sequence ID: 81
Sequence Length: 3000
Sequence Type: DNA
Organism: Poplar sp.
ATAACGGGAATGCCCATATGTCATGCACTCGGTCAGCTCAGCATTTTCAAGGTAGTATAACATGCAGAAG
TTAGGGCACATGTCAATTTTTTAGTATCCTAAACTGAGGGGTTTCATCATGGACTTGGCAGCATAGAAGT
TCTCTTTTAGCCTGTTCCCTTCAGGTAAAATGCTTCTCACCCATTCGATAATCTTGTCATAACCGACCTC
ACTCAACCCGTGATTTAACTTGATGGTGAACACATGTGCTACGGCTGATAATTTACTGTGGTTCGTGCAG
CCATCCCATAATGGTTCGTCAGAATCTTTCAACAGATCAAAAAACCTTGCTACATCTGTATTACGTTCTT
CTTCTATGATTGGACATTCACTGACATTACCTTCACTCATTCTCATTGCATCCATAACCATATTCATGTA
AGGATTATTGTTCTCATTTCCAATTTCATGCATATTGCTAGCACTAGAAGTTGACCCAACCACTCTTTCT
ACCATGCTCTTATTAGGAACAAATAGTTCTCTATGTGCATAACAACATAGGTAATCCTCCATGAACCATT
TGGTTAGAAGATGCATCGTTACAACATCTTGATGCAGAAACTTTAAAATTTTACACTTCCTGCATGGACA
ACTAATACCGCCATCAGCAAAATTCCTCGGGATAGATGTTGTGAAATTAATAAAACCCTGAACCCCGTTA
CAATAATCCATCCTCCGCAATCCTTGGGGTGAGTCCCAATACATCCATGAACGATCATCCATGACTTCTA
TCGAACCTCTATAAAATTATGACGACAAAATGTATTAATTAACTACATTACGTAAATAAACATAACAAAA
ATATTGGTTTTCCCCGACATTATCCAACAAACTAAAAAAAAAATTATGTTAAATATTCATTATCAATTAT
CAACTATCAACGTCCATACAAAATTTATACATATATAAATTTACGGAAATCACAACTTCGCAATAGAATT
CATAACAATCAAAACAGACCCGTTAAACAAGCTGTTATTTATTTCATCACAACACATCTAATTCGGTGTA
ATTCAAACAAAGTTTCAACAATTTACAAACAAATATAATTTGACAAAATCTAAAACAAACTATAACAACT
ACAAAATTATACATTCATACTACATGTTTCTTTGACAAATAACAATCAAACAAGTACATACGTTAACAAA
ATACATATACTAAAAAAACAATAAAATTCTCATTTAAATGTTAAAACTATATAAAAAAGGATAAATTTAC
TTACAAAAAATGATAAAATCCACAAAAACGGATGTTGTGACCACGTACAAAATTATAAGAAACTTAAGTG
CTTGTGTTGAGAAGAGGGGAGAGTTAGGATAGGTGGTTGGTTGCAGTTTGGAAGGGGAGAGGTGGGATGG
GGAAGAAGAAGGAGAAATAGAGGAAGAGAGTGTCAGCAGAGTGGGTATATATTGACTTTTACCGATGGAA
TCACCGACGGACACGTTCCGTCGGTATACCCGTCGGTGATTCCGCTGGTGAAAGTGTTACATCACTGTAC
GGATATCCCAGTTTGAATCCCTCGGTCATTCCGTCGGTAAAATCGTCTGAAAAAAATCCATGCCATCACA
CCGTTGTAACTTTTCAAAAAAATTGTATAGTCCATCGGCGATACGGTCGGTATATACCGACGAATGTATT
TCATCGGTATATAACGACCGTATCGCTGACGGATGGTATCTGTAGGTATATACCGACAGATTTTGAGACG
GAATTATATCCGTCAGTAATTCCATTGGTTTTCGCCGATTTTCTCATAGTGTCGATTGTATAAAATTTAG
GGTTGTTACACGACAAATCAACTATATCCAAGGAGAAGATAATCTTATTAGAGATAGGGAGAAATAAGAA
ATTACATATTTGGAGGAAGAGAATGATCAACTCGACTCAACTCCCAGGTTTTCACACCCATCACTTCCCT
TACAGTTGTTGCAAATAACAGCTTTAGTTGCTGCCCTCAGCAGCTCCTGAAAAAACTTTACTCTATAAAA
TGAATTTCTCTAACCCTTCGTTCTCCTGTAAATCAAAGCATACGATAATTTTGTTCTTTTTAATTCCACT
CTCTTTTTCTTTTTTAATTAATTAAATATAGGCAAGAACTGGGCACTTAATTTACAATTATTTATAATTA
CGCTCTTCCACTTATATGAGAAAATTTTAAATATAGGTTTTTTGCGTTTTAAAAGCGCTTTTAAACAAAT
TAAAAAAAAATTGTTTTCTTTGCTTTAAATTAATATTTTTTTTTGTGTTTTTAGATCATTTTGATGCGCT
GATATCAAAAATAATTTTTAAAAAATAAAAAATATTATTTTAATACATTTCTAAATAAAAAAAATAACCA
CAATCAAACTCTCATTCACGCGTAACCCATGTCTACGTACATAACAAAGATTAGAAATCGGTATCTCAGC
TGTTCCTGGCTTCCAACCAAAAGCTGAAATTATAAAGAAAATAATGTTACAAGGGTCTCAATCTGTACTT
TTCACTTAGTAGGATATGATTAAGAAAAAAAAAAACGACCTAAAGTAGCATCACTTAGTAGGATATTATC
ACTTGGTAGTTTAATTTATCATTACCGTTTCCGTTCACTTGAGAGCTGTTTATATCTCTCTGGTCTAGCA
TTAGAGCAAATTGGATTTTCTAAATAGTTTTCTATCATATTAAAGTGCATATAAACAAAAATAAAATCTT
ACTAAATTATGTGGTTTGGCTTTAGGTAGATAATAAAATCTCACTAAATTTGTTTTTCACAATTGATTCC
TTTCTTCAAAAGAAAAAACAAGAAGCGATACAAACAAAGACATTGAACTTTTCCCCAGTTTGTTTTCTTC
CTGTTATCATCTCCCTAGTTACGACTATATATATGTGTAGCATCTTCTCTATATAAAGCAAGAGCTGGAT
TTAAGGTTTGCTTTCACTAAGATAGAGCATAGAGACCAACCTTAATATATTACACATAGC
Sequence ID: 82
Sequence Length: 3000
Sequence Type: DNA
Organism: Poplar sp.
ATTATTTGGGTCAACCTAAAGCTCCTTTGACCCAGCTCTTTGCTTGATATGAATTTCAAATTAAATTGTG
TGAAAATTAAAATAATATGACTCTAATGATTTGATTAGTCTAATTATGATCTAATCGACCTAGTCTGAAA
CCAACTTTAACTAAAAAAATTATAGACTTTATTATTTTTTATATATATAACTATTAACACGAGGACACTC
TGAGTGGACTCGAGTCTTAAGATGTGACCTAGATAACTCGGTCAACCAAACCAAAACTTAATTTGCTTTT
AAGAAGAAATTTAAATGAACTTAATCCAACGTTTTCTTTAAAGAAAATTATCCTAAAATTTTTATAATTT
ACTCCATTTTATAATATATTTTTATAATTTTAAAAATTATAGTAAACATCCCAAGTTTTATAAGTTAATA
ACATTTTATACAGAAAAATAAAAGAATCAACAAAAAAAATCTTATCAAGTATTACATGAAGGAAGACATG
GGTGGATTTTTTGTGGCCCTGAATTAAATGTGAGAAAAATATACAAGAGAGAGGACAAATAATATTAATA
TTGAGCCCAGTTTGGCTTACTGTCTCGCCGTGATTAGAGAAACATCATCATATGCCAAGTTAAAATCATA
GGCTGATGGTCCAGCAGTTTACTGTAAAATCATAGACTGGGTCGAGCATCATTATTATCAATGCCTGCAA
GTTCTCTGTGTGGTAATTTTTTTGTTTTGTTTTTAAAAGTAATTTAATTATTTAACTGTTTTTTTTTAAA
TGAAGGATTAAGATGCCTCTAGATCCTAAGCTAATTTTTTTTTTGTATTTTAAGGATAATTAAATCTTTT
TATTGTAAAAAAATAAAATAAAAAGAGTAATTTAACCTCAATAAATTTAATAATGTTAATCAAATCTCGT
GAAAAGATTAATTTGTGCCTCAACTTGCACTTCCTTGACTAGTACCATGGAGAGCAAAACCATAATTGAA
CTGTAGCAATTCACAATATACCGAGTCTTGGTCTACCGTAATTGACTTAGCCTCATTAGTTTTTTTTTTA
TTATTTGATTTAGTTTTTTAAAAAATAGGTTTGTTTTAAACAATAGTGTATGTTATTTTTTATTAGATTT
AAAAAATTAAAAAGTATTGATATTTAGAGTTTATTAAATCATATATATATATATATATATATATATATAT
TTTTACATTTCAGCTGTCATTTTAAGATAAAGAAACCATAATATTTTTCTTTTCACTGTATGCTGATCAT
AATCAAATCGAGAAAGAGAATCGCAATAACTGGCTAGACTAAATTCATAATCAAATCGAGAAAGAAATTC
ATAATCTAGGTCATGAGATCAAGATAACCCCATAAAAATAAAATAAATAAATTATAAAACCCCACTTTCA
ACAAATTCAATGTTGAATGTTGAAATCGAAAGAAAAAAACTAAATCCATGAGATAAGGATAATACAACCA
AAAGAAAATAGAAAAAACATTATGAAACCCAATTCCCAAACAACCTAATATTATAAAGAAAAAACTAAAT
AAAAAAATAAATGAGTTGTTGAAAGGTGAAATTGAAAAAAATAATAATTAAAAAGGACCCAAAAAAATAA
ACCGTGTCATCCCATGTCAATCTACCAAACTTGCGATCCGGGTTATGAGTTGTTGGAAGGTGAAATTAAA
AAAAATCAATTAAAAAAGAACAAAAACAAATTAATGGTTTTTTTTAATTGTTTCCCAACAAACGATGCCA
ATTGATAATGTTTAAAAATTCGATATGCTTTGGAATAAAGTTTTTTGGTGGTTGAATTATATGTTAATTA
AATGTACATTCAAATGACTCTTTTTTTCAAAGTGAAGGAAATTATCTTTTGATCATAAATACCCCTGGAT
ACCTATAAAAAGTTCTTTTTTGGGGGATTTAAGGATCCTCCGATGGTAAAATAGGTAATCTTATAGAGAA
AAGGAGTAATAAATATGCTTGAGAGCCTTAAATTTTAAGAACAAAGTGATTTTTGTGTTGGATATATATG
TTTTTTGAATGTAAAGTCTTGAACCTTTCACCTAGATAGTTCAAGGGGTATTTATAACCCTTGAACTTTG
GCTTCTTCTTGAGTGGAGGAGTTGGAGAATAAATTTACAATGATAATATTTATAAAAAATAAATATCTAT
TACACATACATTAATAAGAGAAGATTGCATTAATGAAGGAAGAAGTAAAATGGGTTTAAGACACTCACTA
TGTCCAAGAAAACTAGGCCATGTTAATGGGTTGAAAAAATAGACAATGACCCAAAATGACCAGGCACAAC
CCTTGGGATTGGGCTCGGGAGCACCACTCGAGCCCAAAAAATGTTGCGCTTGCGCTCAACATTGGGCTCG
CGTTGTGCACTCAAGCCCATAACAAGGTGCTGGGGTCAGGTATGCAACCCGAGCCCACAAGGTGTTAGAT
ATGAGCCTATTAATTGGGTTCATGAGTATTAATGGCTTATGCTAAAAGTAAATATCTTTATATTAAATAT
TAAAAATGTTTTGATGAATCTTGATCCATCAACAGTGATTAAAAATGTCTGTTAGGTTTGTATCAATTAA
GGATTGCGTGTAAAATACTCAATCACGACAAGCGCACCAACAATAATTTTTGGGATTAAGCTTGTTTCTG
TCCTAGCTGTTATAATAATGTTATAAGGGTCTCAATCTGTCTTTATACTAACATTGATGTCTTTTTCTTA
ATTGATTTCCTCCTACTAGTAGAATTGGTGGAACCAAATTGAGACAAGTAAATGAGTTCAGATATCCACA
ATTGATCCCTTTCTTCAAAATAAAAAACAAGAAGCGATACAAACAAAGACATTGAACTTATCCCCAGTTT
GTCTTCTTCCTGTTATCATCTCCCTAGTTACGACTATATATGTGTAGCATCTTCTCTGTATGAACCAAGA
GTTGGATTTAGGTTTGCTTTCACTAAGATAGAGCATAGAGACCAACCTTAATATATTAGC
Sequence ID: 83
Sequence Length: 3000
Sequence Type: DNA
Organism: Poplar sp.
TGGAGATGTACACCAGGTCTGCTCCTGTTGCCTATTGCTAAGACTTCACAACTTTAATACAGCACATAGG
GTGCTAAATCTTAATTAGCATGGTAACTGGGTTGTTCTGCATATATAATTAGAAATCTTAAATTCTTTCT
CTGGAATTGCTTCTATGGACATGCAACACTGAAGAACTAAAAGGAAACCTTGGAAAAGAAACCTGTCATC
ATTGAACAGGAAGTATTTGTTTCTGAAGGCTTTCTTTTTAGTACATAACTGGACAATGCCTTATTTGGGT
CTCTACTCCTTTGGAGTGCTTTTGTGATATTAGTAAATACTTTATTTGTTGTGGTTTATATGTGATGATG
TTTAGTAATGCTCATCTATTGGCTGCAGAGCCATTAAACTTGACTCACTTGTCTACTGACCTGATTTCAG
AACTTGTTTTGTGATGACAGCCCCTGCATGTAGGTTTCCTTGGAGATTTGGGAGGAAACACAATACAAGT
CCATTGGTACCGTAGGAAGTCAAACCTGCACCATGTAAGCTTTTCTGTAGTGTGTTAATCTACACACGTG
GAGGATGATTCCCGTATAAACAAAGAGAATGTTTTGAGACAGTTTATGTGCATGGAATGGATTTGGATCC
TCTCATGTTCTTGAGAACATGATGAATCGTGTTTAAATTCAAATCAATAATTATATTTTAGCTTAAATTC
AAGTACCTTGCTAATTATATATCTGAAAACTATGTAAAAGATCAAGTTTAAAAACGATTCATCATGTTCT
CAAGAATTTGAGAGTATCCAAGTTGGTCTGTCAACAAGCAATATATAGCAATGCAGTCAAGGCAACTGAT
TTCTTTTGATCTAAATAGAAAAGCATCGTGGACTTTAATGACCATCAAATTACTTTGACATGACCTTTTA
TGCTCATTTTGTTCTCTTCACCAACTCAATATGGTTTCCAAATAATGGTCATCGTTTATATGTTTCTGGA
ACAACAAATGCTCTTTCCCATGTGTTTTTGGATGTCATTAGCATTATATAGTCTCCTATATCAGTTTCAA
TATTGTTACTCTCTCTCTCTCAGGTATGGGACAACATGATTATTGAATCAGCCTTGAAGACATTCTACAG
TTCAGATCTTGCGACCATGATACGGGCCATTCAGAATAATATAACAGTATACTTTTCCTTCTAACCTATT
TCTCTGATTTATAATTGGAAAATAGCATGTACATTGGTATCAGTAGTGTTGAAGGACAGTACTCGATATA
TCTGCTTCTTTTATTGTTCTGAATTGTTCTATATAAATCACATGAAAGTTATAACTTGGGGATATGAATT
TGTTGCTTCACAAATTTTTATTTTGTGCGAGTGCATGCTCTTGGATTTTGCTTTTGCTTTATTTATTTGC
CATTTTTTTTAGTGAGAAGCTTTTTTTGATTGCTTTATTTCATTGTTGATAGGAAAATTGGTCCAATCAA
CAACCACTATGGGAGCATTGTGCACACAACCACACAGTCTGTCCAAACCCGTAAGTATATTCCTTTTCCC
TTGCATGCTTCATCTGCGTAATGGCAGACATGTAAATTGTAATAGTGCAATCAACCATGCACTGAAAGGG
CTATTTTCGGAATGGTGAAAGCTTTACTCGTTTGAAACTGCTGAAACACATAAGCATGTCAATTCTCCCA
TACAGAGTTAGACTTGATTGCTCGAGATGCAAGTTTTTCATTGCATTCGGGGAATAAATTCACTTCATCC
ATCAGTTGCAAGGAGTTGGTAACTAATGGCTTGATCCTTTTCCCTTCAAATTGTGCAGCTATGCTTCTGA
AAGCATTAGTTTGGCATGCAAGTTTGCATACAAGAATGCCTCGCCTGGAAGCACTCTGGAAGGTATTCTC
TTCAATCAAACAATCAATAAATTTTAGATTCTTGTTACAGAAGCTAGATCAGGGTAGCCTTGCATATGAT
TAAAATGTGACTCATGTAAAGCTTATTCTCATGAGTCTTGCCTGCTTCCTACTGGTGCAAAGCGTGCCCT
GTAGGTTGTTGATATTGGTTTTATTTTATTCCAAGTAAGGGGGGAAATGCCATTTTTGTTATCACAACTA
ACCTTGAAAATGCTATATATTTGTGTTTTTTTACGTGTCATTTTATCCCATGAATCATTTTATCTCTATG
CTCAAAGCCGCAAAATCAGACCTTCCAATATTTGATTGGACAATGCAAAGGTCTTTGTAGTCAACACAAT
ATCGTATGGACGTTTGGACCATGCTTCTCATGTATTTAACCATGCACATGCCCAGTTCAATCCAGCATGT
TATGCATGTGGACTGCGGCAAACTCAATCCAGCAAGTTTTTTAACAAATAGACTGTTTTCTCACGTCATA
AACTACCTGAATTTCAGCCGCACTCTGTTAAGAATAGTTTTTAATCCTTGATCTTTTGCGCTGCAGATGA
TTACTTTCTTTCCCGGCTGCCCGTTGTGGAAAAGAGACTAGCCCAAGGGGGCATTCGGTTAGCTGCCACC
CTGAACCGCATTTTTGCTTCTTACGTGAAAATTGCTCAAGCATGAAGATAAAGAGAGAAAGAAGCATCTT
CAGTTGCTTACACAGAGCGGGGACCACCGCTCCAATTTATATATAGCACGAACTTACCTTATGCGTAATA
CTTTACTCATTGTCAGCTCTGTTGAGCAAGCTCCGAACTAATCTTTTAAACCAATTCTTGATTTCATTCC
TGTTATGCGGTACGCATTGTCTTGGATATTCCCGAATATGCCCTTCTTGCACATGGAAAATGTCAACTTG
AAGGGTACTCAAGAGTGGAATTTAATGCTTGTACTCAATAAGAACCCTTCTTTCTTTATTGTGTAAATGT
AACCGAACCTTTTCTAAGCTTTTTATATATGTATCCAAAACTCAAATTAGTGGCTCATTTCGTTTCTCAT
GTTTTGTGATATTGGAGGAAGAAAACATCAAGCAGTTCAAGCTGAGAAAAAAATAAAGAT
Sequence ID: 84
Sequence Length: 3000
Sequence Type: DNA
Organism: Poplar sp.
ATATATATATATATATTTGTTTTTTTGGATCGAGCGAATAGTCCAGCATAAAACACACAAATTAATTGTT
TTTTAATGGCTATTTGTAAGTAGAGATTTCATAGTTGTTAATAATTTTAAATGATATGTCCAGCGATCAG
TGACGAGGTTGTGAAAAATAATACGACCAAATCATAATTAACGAGCACCCCATCAATTCAACTACTTTTG
GGTTTTAGGAAATTGGGAAAAAAAAGGTTGAAGAAGAAAATTCTAAAAATAAAAAGAAAAAGACAAGTCC
CTGGCCTTAGGGCCACTAACTATTTTGTTTTATTTGATCCTGAATAATTTTTTTTTTTTTTTAGTTTATA
TCAGCCTTGTGGTTGCTGCAGCTCCCTCCAATTTAGATATCATCGAACAGATGGCACTGTAATTACTGGT
ATTAGGATTGCGACAGCACACCATACATGGCATAAATAATCAGCTAGCGTCATAAAATCAACATTAAAGT
CAAATTAATTAGTGAACGATTTATATTGTTTCAGATAATTAAATAAACTTCGACCAGTAGACATATTTAG
GAAATTTATAGTGGATGAGGAGGAGGAGGTGGGGGCAAAGAAGACTTCAATGGCAGCACCCTACCAACCA
CAATAAAATAAAAATAAAACGGGGGTGGTAAGCAGGCTTTTCCACTGCAACCAGGCAAGTTGGTGAGAAC
AAGAGGAATTTGCAAGTACAAGAAATGTAAGAACCCAACCTATCACAACCCGAAAAAGTAAACGTTAACC
AATAAATCTTTTAATCCAATTATTTGACTGGCTCGTGTGTAAAATTAACCTAAGTAAATATTATTTTGAT
ATGAGTTAATCATCTAGAAATAACCTGGATAATGAATAAAAAGTATGGTTAGATTTTTAAAAAATAAATT
TAAAATAATATTTTTTTAAAATTAAAATGATAATATGTTGAATCTACTTAAATTTTATAGATTAATCTGC
TAAACTCGTAATTCAAATTATAAACTCCATTGAATCCAACAGCTTTATATTTAATGATACAATAATAAAG
GATAAATATTTTTAAAATTAAATAATAATAAAAATAGAAAATAATTATGAGAATAATTTCAAATATTAAA
GAATTAAAAAAGTGGAAGATGGATTCCAAGAAAAAGACAAAAAAGGGAGCAACACCTTTATTGTTCTTTG
TATCCCGGTTCTTTCAGCACAGGAGATAATAATTAAAGATTAGGAGTGTCTCTTACAAATACCCGAAAAG
TCTATTTAATATATTTTGCTAGCAAGCAAGCTTGCTTGATGGCGACCTATGAAATAATGACGATGGCTAC
ACGAATGTGAATCCATGGATGCTTATTGGCTAGAGTGTTTTCTTCTCTCTGCATTATTATTTTTTTGTTT
GCAATTGCTGGACTCTGTAGGATTCTGATGCGAGGTTTCAAAATATTATTATATATATAAGAGAAATACC
ATACATTTCATAAAAACAAACTGTACCTGTGATTTGCATTCTATAAGAAACAGTGGTGTGCAGTGCAGCC
CATGGGGGGCAAAGGGATCGCTGCAAAAAAAAAAAAAAAAAATGATGGAACGTCCAAGAGATAGGCTACA
GATGTAAAGGTATGCACAAAAAAAACCAAAATGGCTTTCAAATTGTCAAGTAATCAATGGAGTCTGGGAA
AAAGAAATGGCTAAAGAGCTCCACATTACAAGTGAAGAACGGCCGGCCATGAGTTGAATACTTCCTGTTA
ATGGTTACCTTGAGTTCATCAAAAAGTGATATTATTTTAATTTTATTTTTTTAAAATTAAATTTAGTTTC
GATTGAGTTATGAAATAATTCACCATGTTATTTGTATTTGACTAGATTATCTCCAGCCTGATTTTTTTGC
ACCCGGTCCGAGATAGTTCTAAATTTAGCCAGGAAGCACACTGTTCAGGCCGTTTTAACACGCAAGTAGC
AAAAAGAAGCACATGATTACAATTAATAAATTTTGCTCGAGTTTTCTTCTATAATATTTTTGCCTGGCAT
TGATCCAGCCGACATGATTCTTGGATTTACCATGCACTCGCAATGAAAAATCACAACTTGATATAATTAA
TTAATATAAAAAAAGAAATACCTAACACTAAGGCCGAGTTAGAATAATGCCCAAGTCCAATAGCTTGCAT
GCATCAACTTGAAAGCTAGGATGACGGGAAATTTTATAAGAAATAAAAGAGAAACTGTAGAAATTCAAAA
CAATCCGGAAATATCTCATGATATATAATTATCACTATTTATTTTTTAAAGGGAAAATAACTAACAAAAT
CAATCGAGTTACATAGCATTTCCGCGTGTAGATAAATAAAGAAAAAAAATGGATTTTTTTCTATTTTCAA
GTAAAGATATGCATGGATGTGTTCGTTGTAATTCCCTCTGCCTTTTAGGTAGATATGGTGATTTAAATTT
CATGGCAGAAAAATCATTGATTAAATAATAAGAATTAGAGCCATGACGTAGTGCTGATGTGCCACTTCTC
AACAACCCCCATTTCTCCCCAACCTTCTATCTTTTTGACAAGAACAGGAAATCCTCCGAATTATGGGACC
CAACTTAAGTGCATGCTACTTACCACAATATCCCAAGTGTCACAATCCCACCCATTGAATCCCATGATAA
TCCAACGGCCACGTACACTTCTCAACTAACACATCGGCCAACCCACCCCACCCTCTACCTGCCTGCCCCT
CCTTCCTTCTCTATTTAAAGCACCTAAATTTTGGTGAACAAACTCAGGATTTTTGGGTAACCTGAAAATT
CCTACATACATTTAGAGCCTCGCAACTTCAATTTTTTCTTACTATACAACCCTCATATAATTTTTTACGC
CAGAAAATTCTTTGTGCTCACACATCCGTTCTTCTCTCTCATTTTCTCTTTGATCATACCAATCGATCCA
TCACTCTTTTTTTGTCTCTCCCCCATTTTGGCATAGAGGATCATCGCTTTACAGGGAAAA
Sequence ID: 85
Sequence Length: 3214
Sequence Type: DNA
Organism: Poplar sp.
ATATTAAAACAACATGATAAGATTCAAGGGTTATATATATCATGGAACTACTCAGTAAATATATTATTTA
TATTTTTTTATTTTCTAAATATTTATAACCGCTAATAATATTTTTAAACGATATGTTCTAATTAATGATA
AGACAATGAATGCACTAAGATTTTATATATATATAGATAAACAGGTCTCTGGTCTTAAGTCCACTTTCTT
GTTTAATTTCCTGAATATTTTTAATCTGTGATTGTTGCAGCTCCAACTCAGATAATATCAAACAGATGGC
CCTGTAGTTAATACCGGCATTGAGACAGTGACGGCACACCATACATGGCATAAATAATTAGATAGCATAA
CAAATTCGACACTAAATCCAAATAAATTAGCGCTTAATTTATATTGTTCTGGCCTGGGTAGATGAACTTC
AACGAGCAGAGATATTCGGAAAATTAATTAATTATGAGGATGACGAGGGCTGTAGGGCAAAGAAGACTTA
GTGACAGCTTCCTACCAACCACAATCTAATTAAATTAGAACGGGGATTGGTAGGCATTCCACTACGCAAG
TTGATGTAGAAGTACAGAAAAGTAAGAGTCCAAGCAACCAATATTCCAAGCTCAAAATGCACACAGGCTG
CATCTTTTTCATGGTTTCTGGGCAGTAAAGAAAGGTAAAAGGGATGCGAAGTAATTCGTTCATCGTCCAC
GAGATCGCTACGAATGCAAATCAAGGGATGCACAAAGAATCCGACACAAGAGATTGAATATTAATTGGCT
GTCGGTCATGTGGTTCCGAGCTGTCAACTGATAAACTCTTAGGCTGAGAGATAAATGCACTTTGGGACTC
CAAATATCCAGTTATATTTACAGTGAATTCATCGCACTTGTCGTCTCTGTGCAGTCCTTCTGGACTTGGT
TTTTCCTGAGTTAATATGTAGGGTATTATCTGGTACTGACCTGGCCCTGACTTCTATGAAGCGTTTGGAA
ACGTGGCAGGCGGCGGCTTTTTAATTTTCTTTTCTGGAAGTAATATTAAAAATATTACTTCCAGACAAAA
AATACTTTAACAACAATTATCCCATACCATACAATGACTTGCTCATCCAAAGACCCAGCTGTCCATACGT
TAGACATCCATTAATAATAATAATAATAAAATAATAATAATGCGCTATATATTCTCCTAGATAAATCACT
TGCTCTTCCAACTCCCAGCGAAGCCTGTTCTTTTCTTTTGTGATAATTTTATTTTCTTGATTTAGCTATG
AAGCCCACTGCCAAGGCCGTTTTAGCACCTAAAATAAATCTGAAACCCGGTTCTGGTCCGGTTTTTTTGA
ACCAAAAAGGATACTGAACCCACAGCTCAGGATCATCATGCACATCATTGTAAATGAGATGTCTATTAAA
TTTTGAGCCACATGATAGTATTAAATCTTGCACTGTATCATGCACATCATGACGAGTAATAATAAAAGCT
TGAAAACCATTATTTATTAGAAGAGTTACATCTATATAATAGTGTTTGGGATAATATAATATTACTTGGG
ATAATGATTAATTAATATATTTAAATACTTGATTTTTTTTTAATATAATGAACTCCAGGCTAATATATAC
TGGAAGCTTGAATAACTGCAAAAACAGTCTTGATGGAAGGAAATTGAAGATTCTGTGATGATAAATTTAA
TATATTTATTAAAAATATATTAAATGATTTAAGACAAGAAATAATTTTAAAGAGCTTTAAATTCAAAAAA
TAATGATGTTTATTTTTAAGTTTTAAGTGGGTTAACACTCTGAAATTCATGTATTTTTTATCTTAAGACA
TGAAAAATTATGAACATTTTATCTATATAATTCAGGGGATACTTATACCTCTTAAACTTTGTCGTTTTCA
GATAAGTAAAATTAAGGCTAGAAAGTCTTCTGTTTTCGATGATATTAACGAGAGAAAAATATTTCTTACA
TATCATTAATGACATAGTAAGTATAGCAAGTCCCTTAAAAAAACCTTGTATACACCTATAAGTATAAGGA
AATTATTACATTAACATGAATGATTATTCTAGATGGAGAAGCAAGACAGTTTATCATGTTTTTTATATTT
ATATTGTAGATGATCGTCTAGGATCAAACATATAACTTTAGAACTTGGTAATATCTAAGTTTTTTGGGTT
TGAGATGTTTGATGGACATACATTTCCTTATACATGACTGACTACCAAGTCTAAATTTTTTAAGCCTAGC
ATATTTATCAGACCAACGTTTAACCCATATTTACCAGACTAACTGTTAAGTTCAAGTTTTTGGGATCTGA
CATGTTCGTTAAACTCACATTACCTTGAGCTTGTTTAACTGTCAAATCTAAATATTTTGGGTTAGACATA
TTTGCCTAACTTAATTTATTTAATAATATTTTTTATAAATAAAAATCTTAACCAAAAATTAATCCATCAC
TTTCAATATAGTTTCAACTATAAAAACGTTATAAATGACAATTAAGTCTTATTTTTATGAGAGAAACTGT
CAACTACACAACAATTTCAAATCTAATTGTGTGAGACTAGTAAATCTTAGTTAATGGATTCGCAATGAAA
CCTTCTATCTATAACACCGTGTCCTTGATTTTCTTTCCATTGTAGGTGGACAGCACAAGATACTGTGATT
TAATTTCCTTTTTTTTTTTTTGGCAAAAAAAAAATTGCTGATTTAAGTAATGGACATTAAAGCCATGACG
TAGTGCTTATGTGCCCCCTTCCCACCAACCCCCATCTCTCCCACCCTTGTATTTTCTCGACCGGAAAACC
TCGCCATTCTTGGACCCACCTAAGTGCGGGCTACTTACCACAGCATTCACGTGTCAAGATCCCAACCATT
GAAACCCATGATGATCCAACGGCCACGTGCACTTTTCAACGAACACATCGGCCAACCCACCCACCCCTCA
ATTAGCCTCAGCTCCCCTGCACACTCTATTTAAAGCACTTGATTTTTGGTGAACAAACTCAGGGATTTTT
GGTGACCTGAAGATTCCTACATACACATAGAGCCCAGCTATCTTAATCTTGCATGCTGAGCAGCCCTCTT
GTATTCTTACACACACGAGAAAAAGAGATATATTTTGAGCACACGTATCCATTTTCTCCCTCCTTGACCA
CCGATCAATCCATAATTCCCTTCTTTTTCCCATAGAGAATCATCACTTTCAAGAACGGGAGAAA
Sequence ID: 86
Sequence Length: 1880
Sequence Type: DNA
Organism: Poplar sp.
GAGAAAAATAAGCTTGACTAATTTCACTATGACCATATATACTATGTGTATGGAGTGAGCAGTGAGGCTC
TCACCAACCACACATGTAGCTTATCCAAGAGTTTGACAAATTAATTAAAGCCTGTAAGCTTGATATCTCT
CTATGATTTTCTCATTGTCTTCACCTACCCTCCCTGGATGAGAACCACCACTGTGGTTTGTGGTGAACAA
GACCCGGTCTAACCACAACAACTCCTGGCTACTATTTTCTTCTTCTTTTTTTTACATTTTCTTGAAGAAT
ATGTGCACTGTGGTGTTCTCCACTGATGTATCTTTTTTAATTGATGCAGGCTGCTGGATATTATCTACCA
GGAACCTCACGATACTGGGAGCTAGTAAAAGATAAAAATAATAGAGATATGATATACATAATTTCATATA
TTTCTTGTTTTAAAAATATATAAATTTATCTTAAAAACTGTTACCATAGAGACATGTTTATTTTATTTGT
GTAAATAAATATGTTTCTTCCTATCTTTTTTATTACGATTGCTCATAATAAAGACTTTATTATGAGCAAT
CGTCCATTAATTCAAGAGGTTAATGATCATATCACGTGTAATTAATGCTGAATTGATCATGGGAAACACG
TAAGATGTTTCCTCCTCAAACAGCAAACCTTAAACTAGTTGCTTTGAAGAAAAAAAAAAAAAAAAGGGTT
TGGATCATAAATTAACTTGACAGGTTTTTTACAACTCTACTCAGAGCAGGTTCAAACTATCGGGCAAGCA
GGGTTTAATTAATAAAGGTGGCTCTGTATGCTCTGCTTTTCTTCTCGAAAGAGAGAATGGTATGGGTAAA
CTTTCAGGATGAGAAATATATCCTTTTCTTTGTTGTCTTCGTAGGTTTTTTTTGGATTCGTTGATTTTTT
CTTCATTATGGCTATATCCTATATATCAGCCAGTGACTTGGCCCTGGCTTTCACTTGTTCAAACCCTACG
TTCGATATAAATATTTTTAAATGGTTAAACAGTAATACCAAATAATCAGGGCAGAACCAGGGGAGGGGAG
GCAAGCAGGAGCTGGGCGCCTGTAAAAGATTTTAGACTTTTTTATTATTTAGTGTTTAAATATAGAATAA
TATATTATTTTTTTATTTTAAATAGAGGGATTTTCTAATAATAAATTATATCTTGAGTTTTGTCTACACC
CCAACAAATATTATTTTAATAACGGTTTTTTTTTATAAATTTAGTCATCAAGCCCACTGTTCAGGCCGTT
TTAACACCCAATTAAGTAAATCTCAGTAGGACTAGCCGAAAGAAGCACATGATTACAATTAATAAATTTT
ACTTGAGTTTTCTTCTATAATATTTATGCCTGGCTTTGATCCAGCCGCCATGATTCTTGGATTTACCATG
CACTCACGATGAAAAGTCACCACTTAAGTGCATGCTACTTACCACAACATCCCAAGTGTCACAATCCCAC
CCATTGAATCCCATGATGATCCAACGGCCACATACACTTTTCAACCAGCACATCGGCCAACCCACCCCAT
CCTTCTCTATTTAAAGCACCTAAATTTTGGTGAATAAACTCAGGATTTTTGGGTAACCTGAAAATTCCTA
CATGCATTTAGAGCCTCGCAACTTCAGTTTTTTTTACTATACAACCCTCATATAATTTTTTACGCCAGAA
AATTCTTTGTGCTCACACATCCGTTCTTCTCTCTCATTTTCTCTTTGATCATACCAATTGATCCATCACT
CTTTTTTTGTCTCTCCTCCATTTTGGCATAGAGGATCATCGCTTTACAGGAAAAAATGGAATTTTGTCAA
GATTCACGCAATGGCAATGGTTCACTAGGATTTAACACTAATGACCCTTTGAACTGGGGC
Sequence ID: 87
Sequence Length: 3726
Sequence Type: DNA
Organism: Poplar sp.
CCCTTAGAGTTTTAGTTTTTTTTTTTGCAATTGTAATTGTAACTAGATATTACAAAAGTTTAGGTTATAT
AGCATGCGTTTTTATGTGGTCAAGTTAAACCAGTAAAGAGATCAAAGCAATCTAGTATGCGTGTGCACAC
ATATATATAGGATTATAGTTTAAGCATAAAAAATCCTAGTACGCACTATCACATACAAAGCAAAACTAAT
TAATGATAAAATAGTACATGTTTAAGTTGTTGACATTTATTGGAGAATCGACAATTCATTTTGTCTTGTA
TTGGAAAATTCTTGGATAAGTTTAAGGTACTTACTTACTTAAGATCATAGAACCAAAAACAAGTAATAAT
TTGATGATGTTAATGATAAATCATTTGTCCTCAAGCTTTTATTGCTCTTCACATGATGTGAACATGATAA
TTATGTAATTATCCTCCCATATTCCAAGTACTCCTTCTTATTTAAATGTATTATTAAACAAGGTTTAGGA
ACTAGAGAAATTTAAAACTCAAAATCCCTAAATAACAAGCACTAGATTAGGGAATGAAAAAAGTTAAAGA
CATGGCAAAAGGAATGGTAAAATAAGCTAAAAAAAACCACATGGAAAAAGGTTAAAGAGCTACAATTTAG
TGTGATGAACATCTTCCATTTAACCCGTATCTATACTAATTTTTTGAACCTACATTGGTGAAGGATTAAT
CATGAGAAATAACCATAATTAATTCTCATCTTTTGACCTTAAATAACCCTTTAAAAAGGAATAAAATTTT
GATATTTTTTAGCTTTAAAACCATATGTATTTCCTTTGAAAACTATTCAGGAAGATGAAAAAGATTAAAT
GTTCAGACTCTTTATTCATGGGTTGGATATTCATAAATGGACCAACAAAAAAATAATTCTATATGAGTAG
AGAATTATTTATAAAAAACTCAAATCCAAGTCCAAAATAAATTAGCAAAAAACATAATCAAACCGACACT
TGAGGCCTATGCCCGAGCCGAGCCAAGTACGTGCGCGTTAAACTCAAACTATTTTGCTAAGACTTATTTA
TGACTCTTCAACTTTCCATTATATAAACTACAAGAAAATCTTATTTTTTTTTCTATGTGGGATACAAAGT
ATTGAACTTTATTTCATAAAAACATGTTAACTAAAGGTTCTTTGAGATTAATTTTTTATTTATCTATAAT
TTATTTTAATTATGTTAATATTCCATGACAATGAACTCCTATTAATGAATAATTTCCAATGGAATTTTAA
CCCTAAAAAAAAAAAGAATTCCACTTTAAACTTGACCTAATATATCTTTTATTAAAATAAATTATAATAG
TTTAGAGATTTTTTATGTGTCTTAGTGTTCAAGAGATAAAAAAAGAAGGATGAAAGTTGGAGGGGTAATA
AAAAAAAACAAAAACAAAAACACGATGAAGATTGGGCAAATGACTCAATTTATTCTTGCATAATTGAACA
TTTTATATGTACTTACATGTTTAATTATTATATATATTTTTTATAATATACATCCACATAAATTATTTTT
TAATTTTTCGATGTGAAATAACTATATATAGCCTATATTCACATGGATTATTTCTTAACTTTTCAATGTA
GGGTAACTATATAACACTTTATATTTTTACGTTTCGATGTGAAATAATTATACTATACTTCATGCCTCGT
ATTTTTTTTAATAACCTACATCCACTTACATTGTTTCTTAATTTTTCGATATGAGATAACTATATATGGC
TACATTAACATGCATTATTTTTTAATTTTTTAATATGGGGTAACTATATATAGCAATATCCATATAAATT
GTTTTTAAAATTTTTGATATGAAATAAATATGCTACACTTCACATTTCTTTTTTATAGTCTACATTCACG
TAGATTGTTTGTTAACTTTCCAATGTGAGATAACTATACTATACTTTTTACCTCATATTTGTTTTTTATA
GTTCACATTTACATGCATTGTTTCATAATTTTTCTATGTGAGATATTAAAATTTCAAACATATTTTTTAA
AAACTTTCCGGGTTTACTTGAGTCAACCTGTGACCCACGACTCGGCTCCTTGCTTGGTCAATCTCCAGGC
CGCGTTTAATAACTATGCTTATAACTAGTGTTTTTATTACTTAAGTTTGTGGAACACAAAGTTAAAGAAC
ATTTGTTAACGATCTCGTTATCAAACACATCCTTAAATTTGTAATACTTAAGACACCATTTATTTTCTTG
TTTGGAGCTGTGTTTGCGTATATTTTAAAGGTATGTTTGGTTTGAAAAATTATTAAATTGATATTCTTAG
TATTTTCTATAATCTTGATATGTTTATATATAAAATAAAAAAATAAAAAATAAAAAGTATTTTATTATAT
TTTCAAATAATAATTACTTTAAAAAATTATGGTACACTACAATAACACACAACCAATTAGTTTTGGCCCA
TTGATCTTTTAGAACATAAATGTAATTTCACAACTCCTATGCTCCGTTTGTTTACTCGCAATAAGATTTT
TATGAGGCTCCGTGAATTTTAATTGTTTATTAATCAAAATAAGATTGGAAGCATACACTTACTAAGAAAT
GTACTTACATAATTTAAATGAGTAGACAGTATAATCAAATTATAAATTTCAATTCATTTCTAAACATTCC
AAACTACATGATTCGATTTTAATATTAGCATATTAAAATAATAATAAAATATATAAAAAATAATTTTAAA
TAAAAACAAATATTAAATTTTTGGCGACCTTTATTAAGATCGAGTTCCATGTTACAAAATTCACGATACA
TAAAAGTACAGAAAACAAAAGTGTCACTTCCCTCGGCCAATAGAACTGTAGAATCAAGCCTTCGCGATCC
TCGTCACTTCTCTAAGACCACATCCTTGCCGTTCATATCAAGTAGAGAAAACACAAATTAACAATGTTTA
AACCGTCCGATAACAAGGAGAGAAAGCACAAAGATATCCAATCTTACCCGTCCGATTCCTAACTCCAAAT
CTCTATAAGTAAGCCTTGACTTCACTAGATTTCAAACTTTACAAAAATTCGACGCAGGGAGGGAGCGAGA
GATTCTCGAAGAGATTCAAAGTTGCCTTTTTCGGAGTATTCTATTTTCTCTTGTTCCTAATTTAGGGTTT
CTGATTAAGTTCTTCGATCATTAGGGTTACTTGTTGTTTGAAATTAAAGTCTGCTTTGGGGGATTTTGGG
TATTGAATTTGTGTGTTCTTGATTCGGTGTTTGAAATTGTTGGATCCTTTTCGAAGTTTACGGTTTATTT
ATCATTTTCGTTTCAATTAATTAATTTTTCTTGCGTTGTTATGATTGCAATTATTGATATCAACTTTCAA
ACCAATTTAGGATTTTTTAGACTTATAAGTTTTGATGGAACTGTTTTTTTATGTCACTAGTTGTGTAATA
GTTTCAAGGTCATTCATATTTCGATAACATTTGTTGAATTGTGGTTATGTTTGCTTGCTGAGAAAATGTA
AGGAAAACACATTTTCGTTCATGGCCTATGTTATAAGCTTGATCAAAGATATGAATTCTGCATAAGACGT
GTGGTTTTGATTATGTTTTCTTCTGTTTCTCAAATGTTGCCCAGGAGGCCTAAAGCGAGGTGGTCAATAT
CTGCATGAAGTTGTGTTAATGAATGTTAAATGTTGTCTTTTATTTGTTATTTGGATGATTGTATCTGATG
AATTGGTTGTGTATAG
Sequence ID: 88
Sequence Length: 3741
Sequence Type: DNA
Organism: Poplar sp.
CTGGGAAATTATTCAATATTCTTTATACTATTTGTTGGTTCTTCACTTGTGGCTGAAATGCTATCTTACA
ATAATAGGCTTTCAATGAAGATGCAGCACCACCCCTTTTTTCAATGTTCCTTTCTATGAAACGTTAAAAC
TTATTAGTAATTGTTTTTAGTCTATGTACTGTTGGATTTTAGCTAATCTACCAACATATGTAAACGGAAT
GTGTCTTCAGATTCATATTCTGCAGATCTGTGCTCTCTGTCTTCTGCCCTCTTGAAGATGAGCAATATCT
ACCCATTTGCCTGCCCCATCTTCCCAATTCTGTCTCCGCGAGATCTGAAGTTGTGCAGTCAGCTGTATTT
CGGCTTGCAAATCACCTGAAGGTTGCAGATTGTTTTCAATTTGATGACAGATAAGGAAGATAAAACTATA
AAAATGCAGGTTTCTGGCTCTCGAGTTCCATTAACGTTATGTGGTAAATAACTCCTGGAACTCGATCGGT
TGGTTTAAGGGCACTTCAAAGGAGTATTATAATTTGGTGATAGAGCTTAAGCTGGTGGTCAAGAATAGAA
TATTGGCTGAGCATGGTTGCTTCTGCTGACATGCGAACTCGTTAATTCTTTGGTCAGCATGTTGTGGTTT
GCTGTTCTAGGTGGTACTTGATGATTTGCAGTTGTGTATGAATATAGCTGCTTAGTTGTCTAGGCGTTAT
CAGTGTATAATCTAATTGGTTTTACACCTTCTTAGAGTTGTTTTCAAGCTAGTGCTAAGTTTTGTACCTT
TGTAAAAGAAAATCAGGTTAGTCGAATGGGATATATGTTTTCATTTTCATTTTTTTTTAAAAAAAAGTTA
TAGTGGCAACGGATTCATACATTATTGTTGAAGCTGTGGGAGAGGCATATATGTAAATGGGTCCTGAAAT
TGAAATTTCTGGATCCTTTCAGCTGTACAATTTACAAATTTGACTCGGCTGCTTTTGTGTTCTTTGGTGT
TGTAGCTCCAGTTGCGCGCTTCATGTGATGATTAGCGTCTTTATTTTTTTACTTTTTTTTTCATATTATT
TAAATATGAAAAAAATTATAATCAAAAGTTATCTTGGATAAAAAAATTATATCTATTTGAAAAAACATAG
AAGCAAGAAAGAAAAAGAAAAAGATCTTTCTCAACGCAAGAAAGGATTGGTTTTGAAGGAAGGAATTAAT
TAATTATTTTTTGTTAATTCACTTCCATATTTTATATGATAATTCTATCTTTTAAATAAATCTCACTTAT
TGTAATTCATTCTTGTATTGTTGTAATTTTAAGTGAGTGGAAGCATACACGAATCTAAATCTAAAGACAA
CTCATTTATATGAGTTGAATTTATATTTAAAATTACAATTATGAGTCTACTCTTTATGATTTTCACTTAT
TATTCAAAAGATTTGACTTAGCCATTAGCTTTGATACATAAAACCACATAACATATATATATATATATAT
ATATAAAAGATGTTTGGGCCAAGGCCCAAGAAATCTTGATTGTCCTGTCCAGGTCCAGGGGGAAGGCCTC
CAAGTTGCCCTGGCAACGACCAATAAATCTCCCTTTTCTCTCTATATAGGTTTGCTTATCTCGTTAACAT
AAAAACACTAGGAGAAAAAGTTACAGGCCGTGATCTCATTCTCTGCGCATGATGCGCTATTACAAGGGCT
GAAACATAGCGGACCCATTTATGTCAAAATTGGGGAACTACGAGCGAGAAGGGCATTAGTGGACACCGGC
TCTTCTATCAATATCAGCCTTTATCTTGCATAAGTTGGGAATAGAAAGGTGCCGATCTCAACCTTCCTCA
TCAACCTCCAGCAACTTGCTCAACATGTGAGCCATAACCTTTGCTAACGACCATGTTCTTCATCAGAATC
CCATTCCAGTATTCCAAAACCAAAAAAGCCATGCAGGGACAAGGACAAGAATGTTGCACACTAGATAGAA
GATTCTACACAGTTTTGCTGACTTGTGACATAAATTTATTGCTCGCTTTAGCACCGATATGCCAAAAAAA
AAAACACTCCATGATACTGATTTTTTTTTTTATTATTTTCATCCTTTATATTGATTTAATTTGAAATTTG
AATTTTTTTTTATTTTTTATAAGATTATTCTATTCTCAAAATTCATATTATAGGTTAACCCAAATTAACT
TAATACTATTTTGTAAATTCCTTTTCAAAATCAACTATTTTTTTAATTCCAATCATTTAATATTTTGTTA
CTTATCATTTAATTCTTTCATGTTAACTTGTAAGATTGTAAAAAACTTTTGATAAAATTGACAGGAATTT
TTTTAAAATATTGTCAGGAGTTCTTTTTATGCATGCTTTCGTTATCATTTTTTATTTAATTGATTTATTG
TGGTTGTTTTTTATTTTATTATATAATTAAATAAAGCTTGCTTATTGAACTAGTTTATATTATAATTTGA
GTCACGATTTTTTTTAATTTTTTTTAAAATATATTAATCCGGCTTTTGTATACCGAGGGCCAGAAGTCTA
ATAATAACAACTTATTCAAATGACAAGGAAAGAGAATTAAATATTAATTTTTTAATTAGAGCTTTATCAA
TATATAGTTTTTTTTTATAAATAAATATCCCTTGTGTGGATAACACATAGCATAAAGTACCCGATTTTGA
GAAATTACACATAAGAAAGTCCTTAATTGCAATTTCCTAAATCTGAATGGACATCTGACAAAAGACATGA
TACATAGTACCAACCACACATTGAACTTCCTAGCCACAAGGAAAGTACGGGCTTCGTCCTTCAGCCAATA
AGATTCGAGAATTAACCCTCAACGATCCGCGTCATTACTCTAAAACCACATCCTAGCCGGTCACATCAAG
TAGAGAAAACACAACTTAACATTGTTTGAACCGTTCGATTATAAAGAGAGAAAGCACAAAGATACCCAAT
CGTACCCATCCGATTCCTCCTCTAAATCTCTATAAATATAACTCGACTGCTTCTTTAATCAATCTTTACA
AAAATTTCAGAGTTTTAGAGAGAGGTTTCTTGAAGAGATTCCAAGGTGCGTTTTTTTGACTTCCTTCTTC
TGCTGTTCTTGATTATGGTTTCTAATTAAATTTCTTGATTGGTCATAAGGGCTTAGTGGTGTTTGTAATT
GAAAACTGTTTTGAGGGATTTTGGGATTTTTAGGGTTTGAATTTGTTGGTTCCTGAATCTGTTTCTGAAA
TTGATGGGTCTTGTTCGAAATTTAGGGTTTCTTTGTCAGTTTAGTTTCAATTAATTGTTATTCTATAATT
GATTTGATATAATTACGATTATTGATTTTAACTTTTCGGTAGTTGGTTTGAGATTCAGGGCTGTATTGGC
ATTTTAGTTCTAATGATGTGTTTCTTTGCGTCTTTAGTTGTTAAGATCTGTTGAACAGCGTTATGTTTGG
TTGCTGAGAAAATGCTAGGAAAGCCAATTTAGTTCTTGACCAAACGGATAAAGCCCTTTACAAGACTGTG
TTTAGATCTTGAATTGTTTTCTTGAAGACCAAAAGTGAGGCCTGAAGGTGCATGAAGTTGTGTTAATGAA
TGTTAACATGTTTGATCAAACAGATAAGCGCTTTAGTCTTAAGATTTTCAACTGTTTTCTTGGAGACCAA
AAGTGAGACTTGTGTTAATGAATATTAAAATGTTTTATCTATTTTGGCCTTCCTGATTGAATGATTGTTT
CTGATTATTTGTTTCGTGTGTGTGTGTATAG
Sequence ID: 89
Sequence Length: 3086
Sequence Type: DNA
Organism: Poplar sp.
ATGAGGTATGGTAACTATGTCATGGAATGTTTTTCATACTCCAAAACTAAAATGACATTGGCGCCGTGAG
ATATAATTTCATGTTGTCTAGAATAAGAAATAAATCAAATTACATGATACAAGGAAGTTAACAATCCCTT
CACATCCTTTATATATACCATATATATATATATTAGAAAAGCACCAAAACCACATGCACTAACTACCCTT
GCATCCTCATGGCACAGCCATTCTATTTAAAAAGAAAATACTAATCCATTTTCATCATCTCAGAAGTAGG
TAGCACATACCACAGAATTTCAGCAACTGAAAACTAATAATTAAGGTGATATTTCCATTTTTCTTCTTGA
TTAATGCATGCATCTGATCATTTGATATATCTTTTTCCCTAGACTATGCTAGCTATATATTTAACTTGCT
TGCTTAATCAGGCATGTATTTTTGCAGACCATGCAGGTGACGATTTCTTTTAATGATAAAGAGCTTGAAG
TGGAGGTTGAAGAGAATGCGACCGTTTTGGGCCTCAAGCATCGACTCCGTGATAAGCTTAGCCTCCAGCC
ATTGGCACAAGAGCTAGAGTTTGAAGGATTTATACTCCAGAATCATGGAAAAACATTGCGAAGTTACCAC
ATTGGAAATAATGCTAAAATCGTTCTTCGAGAGTTATTTGGTATTTCAATCCATGTGGTAAAGCAAGATA
AAGATGGAAAACCCGACCCACAATTTCCAATATCAGTCCATAAGGAAAATACCATTGGATTCTTGAAGGA
GATGCTTTCTATAAAGTATGGCGTGGAGTTTACACATATGAAACTAGGGCTCTCCAGCATGTGGAATAAT
AATCTTCATGATAGTACTAAAATTGGGGCTTATAATCTTCGTGATACAAGTATATTATACGCTTTTGAAA
TGTAATTAATTAATCACCTGTTGGGTGGTGAATTTATCTCTTGATCATAAAAGAAAAAATATTTAATAAA
TAGCATTTTTAAAATGTGTAAGGGTTATATTGAAATAAAATAAGATTTTCACTCTATTATTTTGGAAAAA
TGATATATTGTTCTAGCATAAACTTGAAAGTAATACATCATTTGTTTTTGTGTTCGAAATTGATATTTTA
AAAATGTGTTTTGTTTGAAAAGAGCAGCAAATTAATATTTTTTTAGTATTTTTTTTTATGATTTTAATAT
GCTAATTAAAAAAATAAAATAAAAATCTAACAAAAAATCATTTTGATATATTTTTAAGTTAAAAATATTT
TTTAAAAGTACCATGCATATTATAGGAAATTACTCTGAAACTTCCAAGACTTACACATATTTACACTTTT
TTTCCTGTAATTTTACAAATTATACTTTACATAGCATGTCAATGTAAGATTTAAATTTTGATGAAAAGAA
GAAAATACCCTCCTATATTATCAATCCATCTTTCTCTTCCTCTCCTCCCATCCCAATCTAACCAAAACTC
AAAAATTACACAGTACATACTAAGATTATATATTGTTTAATGTTAGGGCCGGCCGGATTGTTTATTGTCG
GGATCATTTGTTTAACTAGAAGATAGATGGGTGAGGGTGTGATGCATGGTGGTTGGACATTTAAATTTCT
TTGTGACTATCTACTTAATCGGCCAGCCATTAGACTATGTATTAAATCCTTGTTTTTGGATTTTATGTTA
TTGTTTTGTGATTTGCCTCTATTGAATTCCAGTTTAGAGACATGCTTAAAGACCTCTCTATTTACGACAA
AGGATCATAAATAGAAGAGAGTGTTGTGCTGTGTGTTTGTTAGGTTCATGTGGTTGGATTTTGGTGAGGA
GGAAAGGGTAAGGGTGGTGGCTTCTTTTTTTTTTTTTAATTCGATGATGATGAAGTTATAATATTTAATT
TATAAACACTCTTTAGTCATATAATTTTTTAAAACTTCATTGTTGACTGATATTTCACATACTCAGATCA
ATATGTAAACTATTATAATTTTTATTATTATTATTGTTAACGTGAGTGTCTGAGTCAGCTTGCACGCACT
TCGACTAATTCCACGGGCCCTGAAGTTAACGACCATGTAACTCTCTAGTGGCTATCATATTAGCAACCAC
AGGGCTCGAATCTGAGACTACATGGGAAGCAAACCTTTTAGTTTCAAGTTTCTATCACTGATCACCTACT
AGTTGTAACTAGTGGTATGTAAAATGTAATTTCTGAACCTACAAAAGGAAGATGTAATCGCTTATAAATT
CTGAGAGAGTAATTTCCATGTTTATCTCTATAAAACTGTCATATTTGCAACATCATCGCTTTATGATAAC
TTTCAATTCTTCACGTTAAATTTTATGATGGAGGCAAATGGATTATTGAAGCTTATTTTTGTTCCTTTTA
ATTTTACTATGTCCAAGCCCACGAAGAAAATTCATCTTTCTTTCTTTTTTGTTAGTATTTAAAAAATATA
TATATTTTTAAATGTACCAGATGTATTTTTAAAATAATTAAAAAAATATTTTTTTTCTTTTAATATTTCC
ATTGCTCCCACTTTCATTCCGATTTTTCCCAAGTGTTGCTAGGCCCTAGCACGAAGTATCAAGAAAAGGC
CCAATTACAACTAAGTAACAAAACAATTGCAAGCCCAACTAAGCCCAACCCATTAAATAACTTCCAGAAA
GTTCCAAAAAAACGCCTATATCTACCCATCACCGTCACTCCTTAACTCCGTTAACCATCCCACAACCTGT
ACCCCCACGTCCCCATCTCGCAAACGAGACCAAATACAGAACAGCCACCTAACACCGTAAAACAAAATCC
ATATCCCCGTCAAACAAAATCCATATCCTTGAGCAGGCAACTATCCTAACCTTACCGTGTCAACTAAGCA
ACCACAACCATACGACACGTAAAGTGCACACAGGTCAGAGTCTCATTGGTTCTCCACGTCACAGCCTCTC
CTTTGCCGTAACAGACTCGGCTTCCTCTCTATAAAAGTCGTTCCCCTTCCCCTTCCTCTCACACAAACGT
TACCATACATTTCTTTTCCTCAAGTTCTTAAAGCTCACTCTTTTCTGTCCGTCCGATCAAATCTAGAAAA
AAAAAG
Sequence ID: 90
Sequence Length: 3239
Sequence Type: DNA
Organism: Poplar sp.
TCGGTACTTCAAATTAAATGCCCTCACCTTTTTATGTCATAACTATGTCAATAAAAGGACATTAGAAATA
CCCATACCTAGTGGATGACTCATATGATAATATTTTTTTCAATCAATATTGAACCACTAGTTATTAGAAT
TGTTACCTCAAATGTTTGCCATTAAATTATGTAATACATATCTTTTCCATTCTATACTTATTTTTATACA
AGTTAGCATGATTTATGACTATATAAACATCTATGAACCACTGAGTAAAAAAAATGTCCTTATTTCCAGA
TTTATCAATGCATATTGTTATCATCTTCTTAATTATATTTTTGCAAACATATACATCACATAATTTATAA
GACTTCATTTCTTTTACATTTATGTTAACTCAAGCATCAGATGGTCTTTTAAACCCAACATGGAAATTGT
TTATTAGGTACTCATGATTTTCAAGTCTAGTAATTTAAATTCAATAGTTCAACGCATTTGTCAGCCTTGA
AATGTGCTTAATCTTCTGGGAATTTTCCTAAACCTTATCATTGGCATTATATGTGGGTAATTTGAACAAA
AATAATTTCATTTTCCTTTATTTTAACATATCGTTCATTTCTTTCCATGACTAGCAACTCAAAAACTTTG
GGACATGAGATGGTCATATACCTTCCCACCACAAGTACTTCACCAGCAAATAAAAAGCTTATAGAGTCTA
TTTTTGTCCATACAAAAGAAATTAAAGGCCTTACCTCTTTCATGGTAGATGGCTTCTCCATTTATTGGAC
AACTAACACCTTCTAATATGTGAAAAAAACTTTAGCTTAATGAGGGAATAGGCCATAATATGATATAAAA
AAGTAGGAGAGAGCATCATCCATCCCACAACCCTCATAAAAAGCCATTCTTAACATCATAAAGAGAGTTC
CTCAAGTGGATGCTCCAAAAATGGCAAAAGAGAGTCAAAGGATAAATTAATATATAGTCGCAATTATAGG
AGCAACCACCGCCATCATCACCACTCTTCATTAGTGCTTTCCTCAGGTAGCAGACAAGAAAAAAGTCTAG
AGCAAAGTCAAGTTTGTGGTGATACGAGCCTTATACATATTAGTCTATATCCCTACCAAGTGAGAGGTTC
TCAATTAGCCAAACATGTATTAGACACTCGTCTCTCGAGATATTTTTATCTCTATAAAAATAAACCTAAA
CAGCCATGATGGGCTCATAAACCGATGAAAAGTGTACTAAATATGAATAACAATCTATATTTGTTACATA
GGATTCTGATGCGTTATGCATGATTCTCCCTGCCATTTTTCAAGGGCCAGCCTGCATATGGTATCTTAAT
TTGGATCTTATATCCATCCTCAACTGTGAGAATCTTTGTGCAAAGCTCATTGCCTAACATAAGTATCCTA
AAAGACGAGTGTAGAAAGATAGTCTCACCCACGCTTTCAGAAGTGAAAGGAGTCCTATAAATATGGTTGG
TCTTTAAATAGTTTAGGGCTATTGAGATGAATCCAAATGGGTTAGTTTATAATTGCCATGTCTTTCCTAG
ACTTTTGACCACGCTTCAAAAAATAACCTAGATAGAGGTTTATACTACCATCAAGGATAATGACTTCATA
CAATATCCCCTCCTACGAAGGGTGATCTTTATACCCATAACCAAAAAAATATTAATAATATAGAGAAATG
TTATAAAATAAAAAAGTTTATTAACCAGAGCTATCTTCAATAATTCATGAAAAAAGATGCCTAGCCTAAA
ATAGAGGAAGAAAGAGACTGACATGTATCACAAGGCATTATTCAAGATCAATTTAATATGAGAATTGTTC
TGCATTGAAAAAGGAAATATAGAGGTTCATCAGCAAAGGTTATCTTCAATAATTTAAAAAAAAGTTGCCC
AACTTTAATGGAATGATGAAAAGGTTGGCGCACATCATGATGAATTGTCCTAAATCAATGTGATATTAGA
TGAATTGTCAGTAAGAAAAGACTCCATGAAGAGAGAAGAGCTTATGAGAAGTAGGTTATCGTTATCGCTT
GTACCTTGAACCCATGATACAAATCAACTATTTTTACTATAAAGAATGGAGAAGGGGTAACTTTTCCACA
TAAAGATGCATTAGTGATCAGTATCATCCTCTTCCACCATTCTTCCAAAGAAAGTGATGAGTAAGATGAA
TAACAAACTTTCAACATAAAAAAGAAATAAATATTTAAAAGTATGGTATAAGAGAAAATAGAAATAAAGA
ATAATATAAAAGCTTGCAAATTGATTCTACATCAATATTTCAAATTAATGATCAAACAAAATTATTTAAA
TTGGTTCGAAAATTGTAAAAAAAAAAATATTAATAGAATTTTTATCTATAGATTAGAGGTGTAGATAAAA
CTATAATATTTGGATTATCTTTTTAAAAGATTTTGATTTTTAAGTGAAATAATAAAAATTTGAATATCCA
ATTGATGTTTTTATCAAGATTTTCTACTATCACGATGGATTGTTCTTTCAAATACAGTCAAGATTTAATT
AATTTGATTATTTTCATCAAATCTTATAATTTTATTCTTTGCTGTATCTTAATAATAAATAGAGTTTTAC
CATTATCTTTATAATTTATTTCTCCTTTATCCATCATCATTGATCACAAATAAGTATTCATTATTTACTT
TTTTTTTTTATAAAAAATATCATCATCATTAATAATTTAATCTTTAATTATTTATAAATTACAACTTTAA
CAACTCATATTTTCTTTCATTTCATCGCAAAACCGTATTCTAATCTTAAATTTGATAGATAAATCAGTCT
AGTCCATCCACATTGAAAAATAAAAAGAAAGAAAAAAAAATAGTGTAATTTGATAAAATTGCAAGGCAAA
ATAAAAAAAAAGAAATAAGTGCAAAATAAGGTTAAAGTTTAGGAGGTGTTTTGTAAAAAATGTGTTGAGA
ATGATTAAATACGGAAAGAAGTCTCTTCTTATATTGGACGCGCTTAGTAAGACCTCTTTTGCGAAACACG
CAAGAACAAGCCCCACCGCACCCCACCCCACCCCACCCCACCCCACCAATAAAAAAGGAAAAGAAAAAAG
AAGCCAAACCCTCCTCCTCCTCCTCCTCCTCCTCCTCTATATCTCTCTCATGGATCTTTGTTCTTTGATA
GATTTACTCACATAATTATAATCGTGAGATCTCTCTCTCTAGAAAGGTAAAGGAAGAGGAAAATAGAAAC
AACAAGAAGAAACAGAACG
Sequence ID: 91
Sequence Length: 3727
Sequence Type: DNA
Organism: Poplar sp.
GTAATGTTTATAAGTAGTTTCTATTGAATAATTCATTCATTCATATGTTAAAAAATTGTATTTGATATAT
ATATTTCTTTGATTTTTTAGGAATATTTTAATTTTGAAATCGTTGTTCAATTGAAGCTATTTGATATTCT
TCCTTATTGATATCTTGGATAACATCTTGATTTTTAAAGGAATCAAGTGAAAACTTTTTAAAAAATTACT
CTTCAATAAAAATTCTTCAACTTGGAGCATTAATACATTTAAAATAGATTATAATTGAAAAAAAATTATA
TTAAAAATCTCTTAGTTCACATGTATTTACAAATCCAAAACACACAATCTCACATCAAAAAGTTATAAGA
TTTTGTTGTAGCTTATATAATGAAAAATTAAAGATTTAAAATTTAATTCATACACCAAAATTTTTAGAGA
GAATATGCGCAACGCTAAGTGATAAGTTGTGGGCTTTAGTCACAAAGACTTGCTAGGCTTGGCGCCGAAG
TCTAGGCTGGATAAAATAATTTGTTAGTCTAAAAGAATTATTATGTGTCCACCCATGATTAAATTGTGTA
ACCATTCTTTACCTAAACAATTTATTTTTAATGGGAAAACATCTTATTTTAAGGCAAAATTTTTTTGTCA
AAATCTTTGTTTGTGGTGGGTAATTCAAGCAATACAATGAGAATTAATTATAATAATTACCAAAATTATT
TTAACATCAATTTTAGTTTCAAAAATCATTGTAAAAAGGGGTAAAGGGGAAGTGTTCTGTACACCATGCA
GTAGCTCTTACACTCTTCTTTGTTATTTTCCAATCTTTTCTACTCAATTTTTCTTCAATCATTCTAGAGT
TCAGATTTAGATTTTTTTAAAGAAATTTTCAGCCTATTTTTCTAAGTTTGTAGACCTTAATTAATAGTAA
AACTAATTAAGATAATGGTGTTGGATTTTTAAGAGGTTAAATGCATTCAATCTATTTACACCAAGTGATG
AATAATAAGAATTCAATGACAAATATACTTTTTACATCTTTCATATCATCTAAATGCTTCAAAAAGTCAG
TATATACATAACATTCTGTTTGAGATATTACATATACAATTCTTTAAGAACATCAACCACCAATTTGTAA
TTTATCTTTAAATTATTTTATACTTACTCTTCAAAACTAACAAACTTAGGGTTCCTTACTCTTCATCTGT
ATGCAAAATTCATCTAGTTAAACCAAACATGTTAAAAGATTTAAAACAAATTCCTAGTCATTTAAATCTA
TCGCGCACACGAGGACCCCGTTTATTTACTGGAAAGTAGTTTCTTTTTGGAAAGTGAATTCCGGGAAAGT
GAATTATTTTTCGATGTTTGGTAGTGTAATAGGAAATAAGTTGGAAAACATCTTCCAGTGTTTGGTTATG
TCATGGAAAATGAGCTGGAAAATAACTTATTAATTTTTTATTTTTTTTCAAATTTATTAAAATAATGAGG
AACAAATCTTATAAATTAAAAAGTTGAATGTGAATGAAATTGAAAAAAAATATAATTTCATAAATTATCT
CAAATAAAATAAATAATAATCAAAATAATAGAGATCAAATCTAACAAATAAAAAAATTAAAAGATGAAGA
AATTAAAATAATAATAATTACCATTTCATAAATTATTTCAAATAAAATAAGTAACAATCAAAAGAATGAG
GACCAAATTTGATAGATAAAAAATTTCAATTAAAAAATGATAAAGGAAAAGCAAATAACAATTATAAAAA
TGAGGACCAAAGTTAATATAAAAATCAAATTCTAAGGGATGAAATTAAAAGAAATATATTCAAAACAATA
TATATATATATATATATATATATATATATATATATATATATATCAATTAAAAATTTGAGGACCAAATTTG
ATATAATCAACAAATAATATGATATTTTTAAAATTTTCACAACTTTCGAAAAATATTTTTCGCTTAAAAT
AAAAGGAAAACACTTTCCTAGAAACCAAGTCGAATTTTTCTTTAACTAAAAAATGTTTTCCGTCGATCAG
CTAAACACAGAAAAGTTTGAAAAATAATTTTCAAAAAAACATTTTTTTGTCAAACATACAATGTCTAGGT
TTGCAAATATTGAAAAAAGTCAAATCTCACGTCTTTAAGCTTTTTTTTTTAATATAAAAAAATTATTATT
TTTTATGATTTTATAATTTTTTTTTGTTTTTTATTTTTTTTCATCATAAATGGATGGTGACGGAGTTGTC
CACCAAATCCAGACCCCTTTTGCAAGTTGTGTGATCCATATTATAGGCGTAAGCAGACGGCTACCCACCG
TTTACTCGTTCCTTTCCCTTCCAACTCCGCAACACTCCAAATAAGAAAGATATCAACTAATCATTCAAGG
TGCGTGGACTACACTGCCTCAATTACTTAATTTTGGTTTTTTATATGCACACACTTTTAACGTGGAAAAT
ATTCTATTTTGGCTTTCTTTTTATATTTTTATTTTGTATTTTTATTTATTTATTTATATAAAAGATATTT
AAAATAACCTTGCTAACTTGTGTTTAAATTAAATTATTCTATCTAAATATTTAAATCAAACCTCAAAATT
ATACAAATTAATATATATTTGTAATTTTATTTAGTTTGATGACTGGAAATCAACTAGTAATAAGCTTGTA
GAAAGAAAAAAATTTAAATTTAACAGTAGATAAAAACAAAATAAGATTCTAGCCGTAATAAATTTTTTAA
ATAAAAAATTATTTTCAAATTAAAAATTAACTCATTATTTTTTCATAGCAATATAACGACGTAAATCCAA
CAGAAAATTTTTTTTTTTTTCCTTACAAACAAACAGGAAAATTCAAATACGGAAATACCGCATAACACAC
GCGTACTCGAAGAGCGTAGTCCTTTTCTCTCACTCTCAGTTTCCTAGCAATATCCGCCCCCACTAGACGC
CACTGATAAAAGGAAAAACAACCAAGAAGTCTTCCGGAAGGATCATCCTAAGACGTGGCGTTTCATAATT
AGACGCTGCAACCGGGTATTCCCGTAATTTCACCATCAAATTTCTATGATATATTGAGACGCTCCAGCTC
TCTTCTCCTCACAGTTGTGATTATTTCTTCTCTATCAAAATCTTTAAACAGCTCTCATTCAAGGTATGCC
TCTCGTGTCCGATTGTCTAGTTTTTTCTTAAATTTATTTTTAAATAAATAATTGTTATACGATCTGTTAG
TGTTTTATGGATCAGTCCTTAATAATCGTTTATTGATGACAGTAATCTGTTTTTTTTTTTATCTGGATAT
TACGACGTTGTTATTGATTCTATTGTTTAGATCTCGATTGATGGGGGTAATCGAGGACCCTTTCCATTTT
TTTTTCAAATTTTGATCAATTGATTTATTCTGTTAAGATCTGTTAGTGCTTTACGGATAACATAGATCTG
CCTGATGTTCAGATTTATTTATCTCGATCTTAGGGCTCTATTATTAACTCTGTTTAGATCTCGATTGGTC
GGTGTTTTCAAGGGCCTCTTAAGATTTGATTAATTAATTAATTAATTAATATGGATCATGTTTCTATTCG
TTTAATTTTGATGCTATTTTGATTAAAAGAAAAGGTTATCGTTTTTTTTTTTAAATGATCAATTGAATTT
GTTTGCTATTGTTAATGATCTGAAGGATTGTTATATGTTGAGATCTGAATCTAGTTTGTCTCTGATTTTA
CTTTTTTGGGGTGTCAG
Sequence ID: 92
Sequence Length: 3639
Sequence Type: DNA
Organism: Poplar sp.
AAAAATGTGGCCATATGGCTGGTAAGGTGCTTGTTGCTATTAGTGAGCACATTAATAGGCTTGTAGCGGC
AAGGCTGCAATTTGATGTCATGGGGGTGGAGACGGTGCTGGTAGCTAGGACTGATGCAGAAGCAGCAAGT
TTGATCCAAAGCAATGTGGACGCTAGAGATCACCAGTTCATTTTGGGTGCGACTAATCCAAATCTTAGAG
GGAAAAATTTGGCCAATCTTTTGGCAGAAGCAATGGCTGCTGGTAAAACTGGAGCTGAACTTCAAGCCAT
TGAGGACAACTGGCTTGCAATGGCACAACTTAAGACATTCTCTGAGTGCGTTATGGACACAATCAAGAGT
ATGAATATTGGAGAGTACGAGAAGAGGAAGAGATTGAATGAATGGACGAACCATTCTAGCTATGACAAGT
GCTTGTCCATTGAACAAGGCCGAGAGATTGCAGAAAGATTGGGTCTTAACAATCTTTTCTGGGACTGGGA
CTTGCCTCGGACCAGAGAAGGGTTCTATAGGTTTAGAGGGTCTGTGGATGCGGCTATTGTTCGTGGCAGG
GCTTTTGCTCCTCACGCTGATCTTATTTGGATGGAGACTGCTGGCCCAGATTTGGCTGAGTGCACCAAGT
TTGCAGAAGGTCTGAAATCAATGCACCCTGAGATCATGTTGGCCTATAATCTTTCCCCGTCTTTCAATTG
GGATGCATCCGGCATGACCGATGAACAAATGAGGGATTTCATTCCTAGGATTGCTAAGTTGGGGTTTTGC
TGGCAGTTCATAACATTGGCAGGTTTCCATGCTGATGCGCTGGTCACCGACACTTTTGCAAGAGATTATG
CAAAGAGGGGAATGCTGGCCTACGTAGAGAGGATCCAGAGGGAGGAAAGGAAAAATGGAGTTGACACCCT
TGCGCATCAGAAATGGTCTGGTGCAAATTACTACGATCGGTATCTGAAGACTGTCCAAGGAGGCATTTCT
TCCACTGCTGCCATGGGAAAAGGCAAGTCACACATATTTTTTGTACACTAAAGAAAGAATTGAAGTAGCA
AAAGCTTGACAATCTTGAATCCTAATTCTGTTTTGCAGGAGTGACTGAGGAGCAATTCAAAGAGACATGG
AACAGGCCAGGAGCTCTCGAAATGGGTGGTGCAGGATCTGAAGCGGTTGCTAAGTCAAGGATGTAAGACC
AGAGCTGCTTTTGAGTATGGTATAAGGATCACTTAGAACATCAACCAGTTCCTATATTGTGGAACTGGAA
GTGAATAATTTCTGGCAATTACGCCATTCTTGTCTTCTTCTTTTTACCAGCTACATTGTGCTCGTCATCA
CTTAGTCTAGCTCTGTCTAAAGCCATTGTCAGAACAGGAACTTGTTTATGGTTACTGTAATTCAGTTTCC
TTCATATGTTTGCAGTACTATATGATGTTTGTGCTCTACAGTACTTGCATTTCTTAGCAGCATACCTTTA
TCTTAGAATTTCATATTGAAACCTACTTTAAATCCAAAAAGAAAAGTATATAATTCAATTTCACCTCAGA
GACTCTCACAACTTTGAACATTTTTTTATTGGAAAGTTTCCATGACAATAAATATTTCAATAAATGTTTG
AAGAAAATATATTGATTGTCTTAATTAATATAAATCCTTGGAACTTGACATTATATGTGCGTGTGGAATA
TTTCTCTCCATACATAAGAAAGCAATAACAAAATTGATAATGATGAAGATAGTTCAATTAGTCAGCTTTT
AAGTTTGCTTTCTAGAATTGCTTTTTAGAAATCACCAGTTTGAGTCTCAAAAATCTCAGGGCCATTAGAG
CCTTACATGATCGTTAACTTCAGAGCCCATGGGATTAGTCGAGGTGCACGCAAGCTGACCCGAACATCCA
CGTTGATAAAAAAAAATTTGATAGTGAAGAAAACAAAAAACAAAAAGAGTAAACTCTTTGTTTTCAAGAA
GAAGATTTGAATTGTTTTGATGTGTTGATGTCAAAAATTATTTTTAAAAAAATAAAAAAAATATTATTTG
ATATATTTTCGAGTAAAATAACATTAAAAAACAATTATTAATACACTCACAAGTGTGTGTCTATATATAT
ATATATATATATATATATATATATATATATAAAGGTTTATGCAATGCTATCCTAGACCACAACACATCAG
GAAGGACCCACTCCATTTTCTTGAAGATAAGTATTCTTCTTCTTTAAGAAAATAAAGAAAGAAAGATAAG
GATGCCAATCATCAATGACGTCTATGTCCACGAAATTGGCTTCTCACCAACCGCTTTTTCCTCATGTCAC
GGATGACGTCGGACTAAATTCCTAATATATTAGTGCTAATATTTATTTTTAGAATAAAGTCCTTCCTTCC
CTTAAAATCAAAGTTTATATTCTTCTTAAAAAGCGACAAATTGATGCTTATAAAAATTAATAATCAACTA
TATTACATCATTATTCTAAAAAATTGTAAGAATTGTTGTAAGTTTATTGCTATTTTTTTCTTTTTTTTTT
AAAATAAAGATATTTTCAAATTAAATTGAGATTTAATTTTATTTTTTCATAATTTTAAGGATATGTTTTT
ATATTAATTTGATGCGTTTAAAAAATTAAATAAATGACAATGTTCAAATGAATTGAATTTTTACTATTTT
AATTACTTTAATAATAATACTTTGGTTTGTTCATGTGCACATTATACGGGTTTTCTATTTTTTAAATATA
TTAAAATAATTTTAATTTATATTTTTTTAATATTAACTTATTAAAATCATAAGAAAATATTAATATAATA
TTTAAAATATTACCAATTTCCACATAAATTAGGCACCACTAGTTTTTTTCCTTAAAAAGATTCTCTGTGT
CGGTAGGATAAGATGAGCGCGTTCAAACACACACGCCAGAAAAGAGTGCTTCACCTCTCTTTTTCTCCAG
GGTATTCTCGTAACTTCCTCTATAATTTCTACTATAAAGTAGAACCTCGAGCCCCGAGTTCCTCACAATT
CCGATAATAGCAATCAGCCAATACAAAAAAATCCCTAAAAAATCTCTTTCAATTCTCAATAACTCAATGT
AAGTTTCGTTCCTAAATTTCTCTTGAATATTGGTTGACTGCTTAATCTTTGGTGTGATTGATTGATTGAA
TTGTGTTTTCGATTTGATTAGAAATCGTTTTCTTTTTGTTGATTTTGATCGATTTTCAAAGGATCTGTCT
TTTCTTTAGAATTTATGTAAATATTTGGGATTTGTTTCTTTATGGACATGATGATTGCTTTCAATTTGGT
TAAAAACAAGATGACAGATAATTTTGTAGGTTATATATTGTTCCTTGATTGAAAAAAATTTAATTATTAT
TTGGAAGGCATGATTTTTTAATGGTTCTTATGATTTTGTGGGTTGGGCGTAGGCTTCCGTTTTGATTGAT
TTCTATTTTGAGGGTAGCTGAATTGATTGATATGTGAAAGATTTTGTTAAAGAGTCTGAATGTGTGTGGT
GGATGTGTTTATCTTTTTGATAATATTATAGGATCCATTGACGCATGATGAATTTGTGGGGCTATGAAAA
ATAGTTTTTTTTTTTTTCCTGTAATTAAAGTTGGCTGATCTTGTCTTTGTGTTTGTTATATGTGACCAG
Sequence ID: 93
Sequence Length: 3182
Sequence Type: DNA
Organism: Poplar sp.
CTGTGGCTCTGACTAAAGTTTCTTGAATGTAAAATAATAATTTCCAGATCATGAGTCATTAAACTCAGTT
TAATAGATTAATTTTAAAATCTCTTAGCATGTTTTTTTTCTAATTTAGATTTTAAACTAAATCATGGATG
TCCTGACATAACTCGATCAACTTGAAAAATTAAAAAACAACTTTAATGATTAATAAAAATATGATTTAGT
ACAATGTTTTTATCTAAATGTTTTAGTATATGTTATAATTATTTTTAAAACATGGTCCGACCCTATATAT
TAACTTAAAAAACTTGAGATTAATTCGGATGGTTAGAATAAGGTTTGGGAAGAATCCAAGTTCACCAAGG
AATATATAGAAAACCATAAATCAATGTAGCTAGTCATAATTGATTAGAAGAGTTAGAATAAGTAATCGAT
CAGGAAAAAAAAACAATTAACCATGTATATAAAATTTCACATAATCGAACAATGTGGTAAGTCCTATTTA
TCATAAAAGTTATTGATGGATTGAACTGATAAGTATTACAAATGATATGTCGATATATATATATATATAA
AACTAAAATTCAAGAATGTTGAGTCTATCTGCAAAGTTAGATTCAAGAGTTTTAGGTCTAGCTGTAATGT
CAGACCTAAAAATAATATTTATAATATTAATTATAATACCAATAGTAATATTTATAATACAAATAATAAT
ATTTTTAATAATAATAATAATAATAATAATAATAAACTTGTCTTACTCAAGTTTAAGTGAGTCTGGCTGC
AATGCCGTACCCAAAAACCTTGGATGTGGGTTTGGCTATAAGATTGTATCATGAAAGTGTGATAACTAAA
TAGAAAAAAATATTGCAAAAATAAAATTAAACAAAAAAAATCAACTGAAAAGAAAAGAAAAGGCAAAACA
CTATTCAAATGAATAGTGATTTGGGAGGAAGAGTAAAATAAAATCCCCTTATGAGATCATGATAATCTAA
TGAAAAATAAACAAAACAAATCATAAAGTTTAATTCTCAATCAAATCGATATTAAAAGATAAAATTAGAA
GGAAAAAAAAATTAAAAAAAAAATCTGAGTCAACTGCCTTAACCTACCAGACCAGGTTAACCCATCAAAT
CTGGGATCTGTGTCATGAAAATATGATAACTAAATAGAAAAAAAATAATATTAAAAAACTAAATTAAAAA
AAAAATAATTAAAAAATATTGTCTTTCATTATGGATTTGCACCGTAAAATCTACAGTGAAGGACTAATTC
TTTTTAGTTATAGTTAATTAGGTAAACTTCATATGTGATGTATATAAATAGTATAAAATTAGGATTAAAT
GTTTACATGAAACTCAAAATTTATAACAATATAAATAATTAATCTAATTACTGGGAATAATAATCAGCCC
ATATACACAATCTTTTTTATGCAATTTATCTTTTTTTTCCTTTATTATGTTTCTTTACTTTGTTTATTTT
ATTTTATCTTTTACTTCTTTTTTCCGTAACATATAATGGGACAATCTCATTTTATTTGTGATAGTTTTTA
AATCCGGCTCGGCAGGTTAACTTGAAACTCAACCAATCCATTCTCTAACTTAAGTCGGTTATAAAAAAAA
AAAAAAATCAATTTCAACTTGGAGGTGACCATGCAGGTCAACATGCAACATGATTGATCTATTCAAAATC
TGGTTTGATTTTAATTTTTTTTTATGCAAAACAACTCTGTTTTAGTTTTTTTTTTTAAAAAAAACAATGT
TGTTTTGATTGACATGTGTTAACTTGTTCAATATGTGGCCCGAGCCTTGGGTTGATTCATGAGCCGAGTC
AATTTTAATTGCAACACTACTATTTGTTTTTGCTTGTACTCGCAATTAAGTTTCTAATTGTAGTTTTTTC
TCATTGAAAAATGAAGTAGCATAATTGATCCATATAATTATCTTATTGATCAATGGTTTGACCTAGTTGG
GTTTCAATGATGCAGTCAAACTTGAATAGGTTAACATAAAAAAAATTCTTTTTAAAAAAAATACAAATTG
TTATCATTTTAAAAAGACAATTTTACTCTTTTTTTAATTTTTAATCCTTGATTTAAGAAAAATAAGAGAA
AGTTATTGAATTCTGATGGCAAAGAGATAAAATGATCTTTAACATCAATTTTAACCACCAAAAAAGTCAA
TTTAGGTATTAACAAGTTTCATTCGGTGAAAAAAGTTTCATTTATGTGTTTTTTCGCCTTAATTTTTTTT
TTATTTTAGGTTGATTTTAGGTTTTTATATGGTTGTTTTAGGCTATGAATGAGTTTATCAAGATGTTTAG
AGGGTGTCATGGGTGTTGTTCAAAATAGGTTGAAAAATGAATTTTTAGATAAAAAATACTTAGGACCCGA
TGAAAATTTTTATTTAATTAAATTAAAAGTCATTTTCCCTTTAATATTTAGAAAAGAGGGGTGGATGATG
CGTCTTTTGCCCATGTTATTGGAAAAAAAAACTCCGCTCATGAGCTAGACCTCTTTCATGGGCTTAGCGG
GTTAGGTTTTTTTATAGCCAGACATGTAAGTAGGCCCACATACCAATCATGTTTTTTTTTTTTAATTTAA
AATAATTCCAACCATTTAAAAAATTAAAAAAATATACATCATATCAACATTTCTTTGTTTTTAAAGGTCT
TTTTTATTTGATTTGAAGAAAAAAAACTCGTTTTGTTATAAAACTTGAAAAAAATTAAGACTATTTTTTT
TAGTTTCACACACTATTTTTTTTGTTATTTTAAATTGTTGTTTTATAGTAAAAAAAAGTCTCAGCTCTCA
ATTAATCTATAGTTAAATAAAAAATAATTTTAAAAATAAAAAAATTATTAAATCTAAAAAATGCACAACG
TAAATTGCGGGTTTATGAAGCTAATCTTAGCTAACTTAGTTTTTTTTTTTTAATTAAATGTTTTTTTTTA
ATTTTATTATTTAATTTCCTTTTGCATTTATTATAAACAAAAAGCGTTGAAATAGCCTACAACGAATAAA
ACTCTGGCCCACGGGGACAACTATCCTGATTCCTGCGTGCTCATACTTATCCCCAAAAATCGCAGACCTT
GTTTCGCTTTGTCTCGACTCTCGATCGTATAGTAGTGTTTTTCTTTTTCCGTTTTAGAGAAAATACAAGT
TTAGTAACACAGAAGAGAAGAAGAAGAAGACG
Sequence ID: 94
Sequence Length: 4014
Sequence Type: DNA
Organism: Poplar sp.
TTTTCGGATGTTGCTACTAGTATGCTGGTTAAAAGCGATGCCCTTCAACTGCTTGTACAATGATTAGCAT
CATCAAATAGCTTGCAATTGCTCACTCCGGTACCCTTCAATTTGAGTTTTTACAAAGCTTTTGTTGATTA
CTGCTGATATTTATTTATTTATTGGTATTTGGGTTTATTATATAAAGCTTAAATTGTGCTCTGGATGTTA
TCCTATACAGTTTGTTGTGGTCGTCCAAAATATTTATTTTGTAACTTTGAATATAATGTCATGAAGCTGT
GCATTATAATGTGAAGAAAATCTTGTGAAGTTGTACATTTACTTTTGCCATGTAGTTACTCTTCAGAAAG
ACTAGAGGAAGTTAAAAAACAAAAAAGAGCTCATCAAAAACTAAACCAAATCTAGGTCCTACTATTTTGT
CGTTTACCATGGGGAAATTCAATGTTTATGTTTATGCCAGACAGTTGATTTGGAACTTTACAAATTTGCA
TTTCCTTGATATTTCCATAATTTAATGGAATAAAAAGTAACCATGTCTTATGTGTTTATGTTCCTTAAAT
CAGTACAATAACGCTTTGCTAAATGGATATGGGATGCTTGCAAACATATTATTTCCTTATCTTTGGATTA
TTTGACAAGTAATTTGGTAAACCCCCAATCTAAAACCGGTAAATCAGTGTTAGAAACGGTAAATTTTCGA
TTGAGAAATGATAAATTAGACAGAAAAGTTTTGTGAATCAGAATGAACATTCCTAGATGATTAATTTAAA
TGTCGGATGAGATAAAAAAATTAATCGGTATGTGAAATATTAAATAGCAATAAATCATGTAAGTTTTTTG
ATCGGGTAAAATAATGATTTGAAAGAGGAAATCTTGTAAATTGTGAATGGCTTCTCCCATAAACCATTCA
TGGTCGACCACTTTGTTTAAGAACACTAGATAAAAGTGAGCCAGGAATTTGAACTAATAATTGAAGATTT
CTTAAAGTTTTGGAGAGCATAAAGTGATGGGTTTGGGGGAAAAAATTAGAGGAAGAAGAAAACTTGTTTT
TAACATCTTTTTCCTTCAAACTTCTTGTGTTTAAGAGGTGAGAAACTTTAATTCAAGCTTGGTTTGAGTT
TATCTTGTGAGTGAAATGATACATTTTAGTTAAAATATGCATGATGGAAATTTGAAATTGATTGAATGAT
TGTTTAAATTGATGAAATTGTGTTTGAAAAGATGGTAGAAGAAAAATTCATCTCCCACCATAAGATGAAT
TTCTGTCAGGGTGGGGGGGATCAAGGGGAGTTGGGAATTCGATGAAATTGTTATGAAGATTGCATAGAAT
TGTGGTGGTATAGGTAATTAATAGATAAACAAGATGTCAACATTATTAATTAAAAAGGGAAGGACCCATC
ATTTGTCTATCATGGAAATTGAACAAGTCTTGTTTATATGGAGGAGTTGTAATTGTCAAAATTGATGAAG
AATTTATGTTTGAATGTATGAAGTAAAACATTTAAAAAGTTGATGATAGATTAATTGTACAAGGAAATCC
ACCCTTATCGTAGACAAAGATCTCGACCAACTCTATTTAAAGGGTTTAAAATTGTTGGTTTAGTTGACTT
GAAACATTATGTAAAGCTGTGATGATGTTAGCATAAATATAGCTGACTTGAATGGGGAAAATTTCATAAA
AAAATATGTGGTTATGCATCAAGTTAATAACTGTAATCTTTTTATTGATTCGCTTTCAGCTGAAGTTTGC
ACTAATAAATAATAGAATTTAAAATATATTTTTTCATGAAAATTATAGTTAAAAATGTTAAATTTCAAAT
GGGATGGACCACGTTTAATTTGGAAAACTGAAGAAATGTAATGCTGGATTTTTTGCTGAATAGTTTTATC
AATTAACTTGTCGCTAAAATTTAAACCGGTAAATGATAGAATTTAAAATATATATATATTTTTTTATAAA
AGTTGTAGTTAAAAATGTTAAATTTCAAATGGCACTCCCCTCGTTTAATTTGAAATTTTAGAATTTTGGA
TATAAATTTAAAAAATATATATATATATTAAAATGACTTGTAGCATAACGAGGAAAATAATCTAGTTACC
CACTTAAAAAAATCAGATTTGCCGTAGTGTTGTTAAAGCTACAGGTTTGGCGTTCTATCATCTATCTTCC
CATAGTGCAAAGAAATATTCCCACAAGTGTTGTCTTGAATCATTACTGCGTGCGTAGATGTTTATAACAT
CGAATCGTGAGCAGGATTAGCTGTTGAAAGCCATTCTAGCAAGCGATGAGTCTAGCTGAGTTCTATTTGG
CATCGCAGTGAATTATACTTTTAAAATTTTTTAATTTTAAATTAATTTTTTATATATTTTTAGATTATTT
TGATGTTGTTATATAATAAATAAATAATATTTTAAAAAATAACATTTACAATACTCTTAAATATGCCTAA
CAAATCACAAACCCTACAGCAATCAGAACAAAAGCTATGAATTTTGATCCAAAGCACAAATCGGAAGACA
TGGCTAGAATGGACAGACAAGCAAATCAAATACTTTGATGTGAATCGTAGAAGCTATCTGCTGGGATGAC
TCAAGAAGATGAAAGCTAAAATTAAGCGCTAGCACCATCAGAATTGCATTAATTAGGGATGCAGTTACCA
TGATTATCATTAATGTAGGGCCAAATTGGGATTTGCGGGAAGATTACGTGTGAGTGAATGAAGGAGGGTA
AAAAAGGAACTTCACAGATGAAAAGGGCAACAAAAACATAATGAAACCGACATGACCTAAAAACACAAGC
GCATTCTATTACTGGCTGCTACGTGGTATCTTGGACCATTAGTTTAAAAACAATCCAACGGCCGATAGAG
AAACTTTATTCTATTACTGGCTGCTACGTGGTTATCTTGGACCATTAGTTTAAAAACAATCCAACGGCCG
ATAGAGAAACCCTAATCTAAGACCAAATGGCTTAGTGAGTGTCACTATTTAAACAAGCATAAGCGGCCAT
TCTCGATCTCTTTCGTTTGCTCTCTGTAACTGCGAGAGAGCTCCTTATTTTTTAGATTCCCTAAACTTCC
TTTCTTCAAGGTTAGATCTCGTCTCTCTCTCCCCCTTTAGTATTATGTTATGTTTACTTGTCTGATCTGA
TGCGATTCTCTTTTCTTTTATAGCTTTTAGCTTTTATAATTTTGATGGCATCTGTTATAAGCTTTTCTTC
TTATTTGTTTATATGCTACTGATCGTGTTTCATTTCAGATCTAATGACTCAGTTTTTGTTGATTTTGATT
GAAATCAGATAAGAAAAATAATTCAGACTCTGAATTAGTTTTTCTTTTCTTAAATTGTTTACTGTTCTGC
TATGAATATAATCGGGTTTTTTCTATCCTGAAAATCAGTTGCTTTTAGTGTTTTTATTTAAAGATCTTAA
TTTGAAACTATCTTTTTTTATTAATTTGTGTTTTCTTTTTTCCCATCGGAAACAAGGAAGAAGCAAACTG
AACCTTGATAACATTTGGTCATGTTTGTTTTGATGAAAGTGCCTGAATCTGATGGGAAAATGTTTTATTT
GACTCTGTAGTGACTGTACTTTAATGGTAAATTCCATGCCTTAGTTGCGTGGAGACCTGGGCTCGAATCC
CAGCAGTCACACCTCTGAAATTATTTTTTATTAACTAATAAGCGGATCTAGGCTTATTGTTGTATCAAAG
GTTTGCTGGTTTATTCAGACACATGTATAAGCTGTGATTGTTTTGCGGGTGGTTTTAACTTGTTATATAC
GAATGACTATTTGGCTTCTGTCTTTGGTTCATGAAATGCTATTTTTAAGAACGTGTCATATGTATGTCTT
TACTGTTGTTGAAATTATGGTCACTTGAAATTTAAGTATAAGACTGGTTAATTAGTATTATTGGAAATGT
TACTTTTGTATGTTTTTCTGTCCATTCAATATGTTTGTGTATTTATTAAGTCTTTTTTATTTTATCAATT
CCAGTTTCTCTCCCAAAGTTCATC
Sequence ID: 95
Sequence Length: 3000
Sequence Type: DNA
Organism: Poplar sp.
ACTTTGAGGGGAGAACTAGAGCACAATTAAATAGCTTTTAAATTTACAAATGTAACGTCAAGGTGGATTT
TTTTTTGTTGTTGTCTGTTTGAAAAGAAATATTATTTACTGTATATAGGTTGATTGATGATTTATTTGAT
TTGATTTGAAGCAAGTTTGATGATTTGATGTAGTTTTTTTTTAAAATAAAATGATATTAAAATAAAAAAT
TTTATTTTTTACATTAATATATTCTTAAAAAATCAATTTAATATTTTTTTTTTCAAATAGAAAAACAGTT
TAAATAGTATTTTAAAAAATAAATTAAATTACAAAAGCTACCTTGAATATTTCCTTATGATTCTCGGACA
TGGGATGTCAGGAATCCAGTATTTGTTCCCTTAAGCGCAAGCAGTATCGGATTCTAGAAGTGGTTGACTT
TCATGCTTCATAACAGCAAAACACTTTATCTTGTATAAAACTTTTTAACTCTAATTTGAGGATGAAAATA
CAAAGATAATAAAAATATATATGGTAGAAAAAATATAGATAAAAATATAAAAATAAATATATTTTTAAAA
TAAATTTATATTCTTTAGAGATATAATAAGAACATATCTCAAGATAAAATATATTTTATTTTTAAAATTT
TATTGTAAAAAACTCTCAATTCTAGATTTGTCCAACCAGGACATGCAATGATAAAAATAATTATCATCAT
AGTTTTAAAATCCGACTTGTGAGTCGATCTGGAGCAAAGTCCGAGTCACTAGTAGAGGTTCGGGTCACGA
GCTAGGTTGACCCGAGTCAACATAAAAATAAAAGTGATTATTATTATAGTTTTAAAACTCAATTTGAAGG
TCTACTCGGGATAAGGCCCAGGTCATGAGCAAGGTTGGTTGTTGACCCAGGTCAACGTCGGGATGAAAAT
GACTGTTATCACAATTTTTAAACTCGAATTAGAGGTCGACCCGAAGTAAGGCTCATGTCACATGTTAAGA
GGGCAAACCCAAGTTGACCCGAGTCAACATAAAATGAAAGTAGCTATTATTGTAACTTAAAAACTTGATT
TGGGGGTCAACCTGGAGCAAAAACCGAATCAGAATTAGGAGGGTCAACCCGTGTTGACTTGAGTCAATAT
AAAGATAAGAATTGTTATTACCATAGTTTTAAAACTCGACTTAGAAGTCAATCGGGTCACAGGCAGGGAG
GGTCAACACAGGTTAACATGAGTCGATGTATATATAAAAGTGATTATTTTATTTTTAAAACCCGACACAA
AGTTGACTTGGGACAAGGTTTAGGTCACGGGCGGGAGGGTCAACTCGACTGATCCATTTTTTTTTTTAAA
AAAAATTCAAAACAACCTTATTTTGACAAAAAAAAATTCAAAAAAGTCAACAGGTTTTTGACCCATGTTT
TATCCCGAATTGACTTGAGTTTTTTATCAGATCAGGTCGAGTTAATTCTTCCTTTATTTTTTTAAACTCG
AACCAAATTAGGTTCCGGATCAACCCGTAAAGTCAATATAAAATAGATTTTTTTATATATTTGTTTTATG
TATTATTCACTATAATCAAATATGATACAAAAAACAATTATTTTATCTTATATATCATTACCAACACAAT
TTTATTTTTATTTTATCTTCATTTTCTCAATCTTTTCTATTATAGAATAGTAACTAAATGACAGCTTCGT
TCCTGCACGAGACCAGGATAATATTTACTTATAATACTCCTAAGCCTGAGAGGAGGGACTTGACATGGAA
CTAAACAGTTTTCAAAACCACAAGTGCAGCATTAAAGTTGAATCCTGTACCTTTACTGTCTAGGATAATT
ACTTAACAAAAAAATAGTTTTGATGTAAAAAATATTTTTTAAAAAATAAAAAAAATATTATTTTAATATA
TTTTTAAATAAAAAACACTTTAAAAAATATTTATTATCAGAACTTATTTTTCTACAAGCATGTAATTTTT
TTTAGTTTATTCTCTTTATTATTACTATTAAAATAAAATCAGCAAACCCAAAAAACAAGGCATCTTCAAT
ACAATATTATCAATTATTATTTTGTTTTATTCCCAATTCCAAAAATGGGAAGGCTAGTTAAAAGCGTTCT
CGATATTTTGCCAAATTACCAATGCATGCGAGGACATGACGGTGATTATATTTCACAACGAGGTCATTGT
AGGAAACAGAAATATCACCAGGGTAATATAAATACGTCTACAAATCCTGTCAGTTTCCCTCTCTCTCGCT
CACTGCCTGTTCTTGTATTAGCCTGCTTCTCCTCTCTCGCGGCTAGGGTTTTAGCGCCTCTCTTCAGGTT
CGATTCTCGATGTTCTCCTGTTCTCTCACATGTCCTTGTTGATTAGCTCCTCTTATCGTAAACAAGAAAA
TGTTGTTTCTTTTTTCTCTGTTAAGCATCTGTGTTTTGAATCAGTTTTATCAGCCTTTAATTTTAGAAAA
GTCTTGGTTCTTGATTCTTCGTGCCTTTCTTGTTTTCTTTAGATTATTTACGGTTTTCTCAGTGAATGTT
ACTGGCATACATCGTCGTTGATTTTTATTTAGATCTAGTTTTTTCTGTGTTGGTTTTGATATATCTAAAA
GGATTCCTGTATTGATTCTATGATTTTCTTCAATTAGTTTAAGCACTGTCACTAAAATAAACTTATGATT
TTCTGTTTAACTGATTAATAATCTTAAATTGCTATACAAATGTGTATCTTCAAAATGATATGCTGCTGCT
AAATAGAAAGTATTTTTTATTTTTATTTTGGGTTTCAGTATTTTAAATATTAAGATATATTTGAAGTTGG
CTTAAACATTGTTTTTTCGATTGATTTGTGGTCCGAGTACTTGCATCTTACCCCTAGAGAATTTGTTATT
ATTCTGTATTTTACAAGTAGACCCAGTTGCATATTTGAGCTTACTTTCTCTACGTGGTTTCAGTGTCCCA
GTGTTTTGTTCTTAACTCTTATAACCTTTATATATGACAGCTCAACTCTATTACATAAGT
Sequence ID: 96
Sequence Length: 3847
Sequence Type: DNA
Organism: Poplar sp.
TAAAAAAAAACACATAAAACATCAGCTTAAAAAAGAAAAAGGAGGGAACTAAGCAAACCTAGGTGAATCT
CTTAAATCTAGTCTAATCTAAAAAACTTGTAACTTGTTAAATCATGGATCCAAGTTTCAATCAAGAAACT
TAAATATTATCCAATTTAATTTTGAAATATGAAATAATTTAAAAAATTATTAATAAAAAACATGAAAAAA
AAATGAGTAGCAAAAAAAAATTGAGCTAAAATCTGATAGAAAAAAACTCAAATAAAGATGAAATTAAAAA
AAATATTAAAAACAAAAAAAATAAAATTAAAAGAATTAAATCCAAACTTGAAAGATAAAAAGTCACAAGG
GATGAAATTAAAAATTATTTGTAATATGATAGATTATTTATAGATTAAAAAATAATTGGGATGAAATAGA
AAAAAATTGATTATTTTTAAGCATCGATTATTCGATTGAAATTCATGTGAAGTTTTGCCAGTGAGAATTT
ATTGACAGATAAAGAAATGTGCACGGAGTCTATTGGCGGACGATGAAACACGTATTTCTCCCCGAGCAGA
CAGTGCTTGTAACGTCAACTCACTCTTTTTTCCTCTCATATGGTAAGCATCTTTCAACGACGAGGGGCCT
GTCTGGCCATATAAATTGAACATTTTTTTTTAATCCAACTTTCAAGAATTGGAGCGTTTGATTACAAATC
TGTTTTCAGAGAAAGCACGCGTGTCACTCGCAGAGAGCAGATAAAACACTATCGATTATTATTAATACAC
TTATAAAAACTTGGGTGGAAACACTGTTGTACAGTGAGCCGTGCTAATTTTTTTTTTTAATTTGATATTT
TTATATTAGATTAATTTATGATTGATTTTTACAGTTTATTTTAATTGACTTGATACAAGATTATTGTAGT
GTCAGGAAATAAATGATAGCTTGGTTGATATTTGATTTGGCAAAATCTAAGTCAATTTTATTGATTTTTT
TTTATTGAATCCTTTCAAATTATTTTTTTCAGCATTTGATTTATTTGGTCACTTGACTTTGTTTTCCTTA
CAATCTTATCGTTTTACAATAGGTTTGATCCAGAGTTAAGCTTGATGATTTATTCTGATTGGTTTGACAT
GAGATTTTTGTGATATCATAAAGAAAGTGGATGCTCAATTGATTTTCAATTTGACAAAATCAAATAAAGT
TTTGGTGTTTTCTCCCCTGTTGATTTTTTTTATGGTCAATTTAATGAGTTAGTAGTAAGATTTGTAATAT
AAAAATAAAATTCAATGAAAGAGTATTGGGATAAAAAGCAAGTTAAAACCACATGTTCAATCTAAAAATT
CACAGAAAATAATTTTGGTTTAAAAATCATTTCACAGAAACTCTCTGTGTCGGCATCGTTGACGGCGGGA
TTTCTTACAGGAAGATTACCAAAATAAAAAACCGATGGTTCCATCTGACTGCTAAAACAGAAAAGAAAAG
AAAACAAATACAAAAAAATATGAGCATTTATATATTTAGTTAGATAGATCATTTATATATTTGGATAAGT
GTACTCATTAAAAAAAATTCTTGCTCATTTTTTTTTTAATTTGAATTTAAAAATGACAAGGTAAAAAGCA
TTTTATTTTTATAGCCACCAACTTAAAATAACGAACATTTTAAAGTTGCGGTGATGATAATTTAAAATGT
TTTTTTATTTAGAAATATATTAAAATAATTTTTTTTTATTTTTTAAAAATTATTTTTAATATCAACACAT
TAAATTAATTTAAAAATATATAAAAAAATTATTTTAAACAAAAAATTTTAAAATTTTTAAAAATACGAAA
CATACTGTTTCGTTAGATTACTATCCATTAATGTTAGTTTTTCAAAAAAAAAAAATTAGTTTGAAAGATA
ATTTTATTATATATTAACAAATATAATTACCAAAATAACTCTGTATAATTTAAAAAATAAATATTTACAT
CACAATGAAAAAACTATTTCATCCCAAAACAAGGGGACAATAAAGTCATGAAACTATTATAATAAATAGT
ATTCCATGTCTTGTACCGTGACAAGGTAAATTCCCAATGAGAATTAATTAACGTTTTTGATAACGGTCAT
GTGACCTTCCTGTGCAGGTATATGTGCTGTGACTTCAATGATTCACTGCCATTATGTTGAGGTCTCGGGC
TTGTATGAAAATGTATTTATGATTGTATTTTAAAATATTTTTTATTTAAAAAATATATTAAAATAATATT
TTTTATTTTTTAAAAATTATTTTTGATATTAGCGCACTAAAATGATATAAAAACATTAAAAAAATTTAAT
TTAAAATTAAAAAAATTTAATTTTTTAAAAATATTTTTGAAATATAAAAACAAAACAAAAATATTATTAT
GTTAGTGAATACTGTTTAATAAGAGGTGAAATAACAAATATAGAAAGGTTGAAGGGAAGTTTGGACACAT
TAGCCTTTTCATCATGACAATTTGTTCGAGAAGAATTTAAGAGTGAATTGAATTTTTATTTTTTTTTATT
TACTGGGTTAAATAAAAAAAGGAGACAACATGCATCAAAGCTACCCCACATTGATTATTAGGAATTACCA
CAATTTATCCATCAATCTCCACGGCAACAGGTCCAGCCCATGTGAAAGAAAATCCTTTTTTCGGCCCAAA
AGAGAATGTTAAGATATTCGTTTTCACTGAGCAGACAACACGACGTCGTTGTCTACCTGCATTCGGCAGC
ACGCATTTCCACTCAAAATCCTTAAACCGGAATGTGGACACAAACAACACTTCTACGCTCTCTCACGCAT
TCCTTAAGCGCGTGAAACAACCCCAGTGTAATAATAAGTTCGGATTTAGCAATAAGTGCATCTATGCGAT
TCAGACATAGACATGGCTATAAAGGTCGCAGGATGATATATTTGGTATTCAAAATTATTCTGAGGGTAAT
CTAGGAAGAACAAAATATCACTTTAGTAGTAATATAAATATATCAAACCCTACAATCTCTCCAATCCGTC
ATTAGCTACTCTCCTCCTTCCATCTCTCTCGCGGCCAGGGTTTAATCCATTCTCTCGTAAGGTTGGATTT
TCTGGTACATGTTATCTTCTCTTGATTTCCGTTGTAGTTTTGATCAAGATTACATAACTGAGTTGCTGAT
TAGTGACTTATTTGTCGAAGATTTGTGATATATTTCTCGGCTTTAGTCTAGAATTTTAAGCTGTATCCTG
CGTGGATTTTTTTCGTTAGTTTTTTTTTAATTCTTATTATTTTTTATTTCGTGTTATAAGTTGCTGCATG
AAATTTGTTCTTGTTTGACAGATAGATCTAAGAAATTAATCGCTGTGATATAAGATTTTTCGAAGATAAA
TACCGTTTTATACGTCCGTGTTATTTTCATTGGCATATTAAAATATGGTTTTATATAGATTTCTTTATGT
TTGTTTTTATTGCTTATGCTTTTACTTGGGCGATGATTTTGTTAATATTTGAGATAACAGACTTGCAGTT
TTAACCCTGTAGTTTTGAAATTGAAGCTGGAAAAAATCTGGGACGATTTTATGCCCTAATTATTATGGAT
AATAGTTATTAGATTTTCATGCCGTATTTTTTAACAGTCATGCGGTATTTACGAATAACTATTATCTAAA
CAGTTCTTCCAGTACCGCCTTTGTTTATTTCTTAGTTCTCTTCTGGTGTTTAATTAATAACACTTGTATA
TAATCTGAAACTATTAATTTGATTTGACTTAATACTTTATGTTGAGTATGCTTTCTTCTTGTAATTTTTT
ACTCTACCATTGATTGTTTAAACATTTCATATCTTCTTGTATAACAGTTCAGCTCTAATATATCATC
Sequence ID: 97
Sequence Length: 3642
Sequence Type: DNA
Organism: Poplar sp.
ATTTTCATTAAGTGGAGAATGATAAAAAAAAAAAGTATTGGAAAAAAAACTTAGAAATAATAAGGGTTTA
ATATAAAGAGTGTTGGGCCCATGATTAATGGAATGCAACCTGTCCTTAGCCAACGGACCAGAACAAAAGC
TGCCCGAAAATAAAATAAAATGAACAAGAAATAATAATGGTTTTTGTAAGTTTTACACATATTAAATAAA
AGATAATAAAAGGTGAATTCATCGTTTTTCTTCTCACGAAACATTGTTTCACGGAATGGTATTTTGATTT
ATTTTTATTTTTTTTCCTTTTCTTTTTTCTTTTCTTTTTTTAATTATTTTTTTTTTAATTTTGAATTTAT
TAAGGTTTAAGTTTTATAATTTGTTTTTATTTGTTTTTTACATGGTTATCATAGTTTCATGCTATAGGTT
GTGGATTTAACAAGTTAATCCGAGTTGATTTAAGTTATTTTTTGGTTATTTTTTAATTAATTTTTTTTTA
ATTTTATTCTTTAATATTAAGTTGATTAGGAATTATTCTTTTATAATTTATTTTAATTTGCTTTTTATAA
AATTATCAAGGTATTAGAACTAAGATTACGAATTTGTTAGATTAATCCGAGTTGATCCAATATAATGCTA
TCTAGACATTAAAAAAAATGATGTCAGTTTGAAATTTTTTCGAGTCGGGTTGTCTAAGTGATTTTTATAT
TTGTCAAGTTGACCAAGTCATATCAGAACAACTCCACATCATTTAATTTTTTTTTTATTGTAGAACATAT
TAGTAATATCTAGATATTATTTTTTTATATTAAAAAAATTTAATTTGACCAACAATATAATAGGCGATTG
AACGATAAATTATTTACTATTAAGTGATTTTTTTTTTTTTAGTTCTTAGTTTAACGTGGGTGTCCGGGCC
AGCTTGCGCGCACCTCGACTAATCCCACGGGCCCTGAAATTAACGACCATGTAAGCCTCCAGTGGTCATC
ATATGAGCAATCACAGGGCTCGAATCTGAGACCACAGAGGGAGCAAACCTCTTGGTCCCAAGCTTTTATC
ACTGGGCCACCACCTAGATGGTTACTATTAAGTGATTATTAATAGTTGCTGTGCTTGCTATATATGACTA
GTGGCTTCCTAACACATCCAATTTCAGTGACAATCATTCTTCTCAAGAAGGCGAAAGATAATGAATTTTC
CTGGAGGTGTGTACAGGAGAATTGCTTGTGGTTCTTGGAGAAGATTCCTTATTAGAAGGGCAATCCAACT
TACTATTGTTGCCATGTTTACAATTTCAAGAACAATGCAAAATCTTCTCTGTCAAAGGCTGCGCCATACT
TCCGGTTGGTGCCATTGTCAAAAGTCTCTAGAGAGTAATTAGATAGGTTGCATGGAGGTATCATCCTTGT
TGGCTGCCGATCAATATCGGCGAAAGAAATCAAATGGAGTATGCGGTGAAGGAAGAGTGAGCCATCGACG
GCGCTTTGGAGGCTGTAGTCGAATCAGCTGCTTCTATGCACTGGATCCCATCCCAACTTGCATAGCAGTG
TCTTTCATTGCAGATCTGATATGAAAAATGTTATGATGTTCATTCTATCAATACTCACTTTGATTCTGTA
GCGCACATATCTTTTCTACCGAGTTTACAGTGTTTGAAAGTGTGATATTAATTGTTTTTTAAAATAAAAT
TTTAAATGTGTAGAATCTAAATATATTAAAATAGAAATTCCAAGTGATTTTAGACCCAATCGTAAGGTTA
TGGACTCCAATTTCATCATCATCCTTGGATTGGCAGTGAGGTAATGATGATTTCAGACCCAATCGTAAGG
TTATGGACTCCAAAAACAGGGCTTACCATTTTTTTTATTATTAATATTAAAATTATACTTGTTAAACTCA
ATACCACCTAATAAATTAACTTGAAAAATTCTAAAACTTGATTCATTTTAGATTTTTAATTAAATTAAAT
TAAATATTGATTTAATTAAGTTCGGTTAATCTAGTCAAATCTAATCTAAACCTGGTTAAATCAATATAAA
AAAAATAAAATAAACTTGTTTTGATAAAACTAAAGAACTCAAACACTCCCAAGATGTTTAATAACTCATA
TATATATTTTCAGATATTAGTTTTGAGAGAGTTTACAGTTATGATTAAGAATATATTTGGATTAGAGGTA
TGATGGTTTTTTTAAAAGAATATAACATCTTTTAAACATAAATTATATTTTTAAAAACTAAAAAAACATA
TTTTTTACTTAGAAAAAAACACAAATTACATCTCATCCAAACACACCGTTACAAAAACCACACTGTTACA
AAAACCCATTAAGAAAGCAACAGAATCTCATTGGTTAAGCTACGGCTACGCAAATGAATGTCTCTTTCGT
TGGCTGAGATGTTGATAAAGCCAAGTTATCGTGAGACAGAATCAATTAAATATATAGTGAGGCAACCAAC
AGGAAGATGAGAATGGCTATTCAATACGTGTTTGGTAATGACTTACAAATATTTTTTATTTAAAAATATT
TTTTTATTTTTAATTTTTAATATCAAAACATTAAAACTATTAAAAACATCAATATTGTATTTTTTTTTAA
ATCAAATACACTTTTAAATATCATCTAAAAACAAAAATAAACAGTGCCTTATTCTTCTAATTAGCCACAC
ATATTTGCCACCTTCCAATATGCCTTTCTTTTCGGTTTTTTTTCTTCGATACTTCTTTTGTTGTGATATT
TTACAACGCTTAATGTTTTTTTTCTTAATTTTTAATTAATTTTTTAGATCTTTTTTGTTTTTAATACATT
ATATCAAAATTATAAAAAATATTTTTTAAAACAATCACTTTAAAAAACTGCATGAAACACGAAAATAAAC
GGTCCTTCGAAAATCAACCAAAAAATGTGGGGTCTACAAATTGAATATCAATTTTTACCCTAACCTCGTT
AAATCACTACGCCGTTAACTCATCGCTTCCATCAAGCAAAGATCCATAAATAGAGCCCGTATCTTTTCCA
TATCCTTCATTTCTTTCTGGGCAGCTTCTCTTCTCTGTAGACCCTGCCCTCTCCCTCCCTCCCTTTCTCT
GTAAGCCATCGCCATGTCTCTGTTCCTATTGATTTTGATATCGTTATTGTAGATCTTGATCTGGGCTTTG
GTCAGATTAGTCTTGTTTTGGTTGTATAGTCTGTTTTTTCTTTCTTAAAAATGGTACATAGATCTGACCC
ATGTTAGATTAGATCTGTTTTTTGTGTGTTTGTTGAGTTTTTATATGACCCTTTTTCTTGTTTTGTTTGC
TGGTGTTGATTTAAGAGATTTCATGAATCAATAAAATTCGGGTTTGGTGTGAAATATTGAAATGAAAATA
AAGGAATTGAAAAGAAGACTTTATCATGTATATAAGCTTGGATCTCTTGATTTACTGGTTTTTTTAAATT
CTCTGATAGGTTGAACATGTTGTTTGTGAAACAGTATGAAAAAGAAAAGTTTTTTCTTGTGTTTGTAAAT
GTTGGTTAAGATCTTTCTTGCTTGCATGTATTGTTTATTTTGATTGATTGACGTGATCAATAGAATGTTA
TGGAAGGTATTAAAGGCATCTTTTTTTGAAGATTGATTGTTGGGATTTTGATGCAGGCTTGATTTAGTAA
AG
Sequence ID: 98
Sequence Length: 3699
Sequence Type: DNA
Organism: Poplar sp.
TTGCAGCTTTAGATAGTTGTCAGGTATTTGAGAATCATAATTTTCTAATATAAATGGAAACTGCTCCTTT
TCTTTGGAGTCTTTCATGGCTTCATTCTGTGTGTTTCTTACAACTTAGAAATACATTGTCAAAGACCATT
GTGGTTGCGATGCAGTTTATAATACCCTTCGAGTATGCTTGTCTTGTGTAGGCTGTGTAAAACTACAGCT
ATTGGAAGTACAATTGTTTATAGGCAAATAGAAAAATAAGAAAGTGTGAACAAATGAATAAAGGTTATTT
TCTTCTGATGGTATTATACTTGATAGCTCCCAGAGTAAATCTGTATTTCATATGTGGTTAGAGCTGTGTT
AACATGAAATCCCTTAGCTGCAATTTTTTTTTCCTGAGTAATTTTGATTTCACAAGCTACAACAGTTTGG
ACTCGGATGGTAGGTTTTAACATGTGCCTTGTATTTATTTTCTCCCTTGAAGTCCCATGCACATTTTCTT
TCCATGTGACTTCTTACTCGGTTACTTGTATGGACCCTTTAAAGGATTAAAATGTAAAAATTATTAATTG
GAGCACTAGCAATTGAATAGATATCAAATAAATTTGGGTTGATTTTGGCAAGCTCTCTTGTCAGAAACCA
TAGTTCATAGCTGCATCTAAACCTCACCTTGTGAACTATCATAGAGCCACGCTATATGCATATCTCTTTT
GCAGTCACACTCACCTTGGAGTTTAATAAAACTGAAATTGCAATGTGCAAGTCCAGGATGCAACCTTGCA
ATGTGAAACCAAGCTTGCTAACCATTTCTTGGGATGAATCTAAACGATTGTGAATGTGATTTTCTCCATT
ATAATTTAAATTAATTATACCTATGACTGTGAAAAGTAGAAAAAGGTAACTTGATCTCTGAATTAGTAGA
TGGCTTAGATATATTATCAGCATTTCTAACGAGGTTTTGTTATTTTGCAGTGGTACCTGTTGCAGATGTA
ATAAGAATTCGCACTGGTAAGCCATTGTTTTCTTCCAACACTGATGCCTTTTTGTCTATACTATTCTGAT
GGATCAAGCCATGCATCTTCTTAATTATCCAAACCTTCCTGTTCTGCGATTATGATGATATATGACAACA
CTCTTTCCTTCCATGCACCATTTTCAGGTGAACGTGGAGAGAAGGCTGAAAGGATGACAGGAGGGTTGTC
TGACATGACATTTTCTGCATGACTGGTTTAAAAGCAACATGCGCAGCTCAAGATTTGCATCTAACGCTTT
CTTAGTAGCTAGTATAGTCAGGCATCCATCCTCCGCACCCCTTGTCCTAGTCCTTACTAGAAAATTTGAT
TCCTCCTTTTTTTAGCAGTCTATCTTGGGTTGAACGACTAGAAATAAAAGGAATGTCTATGAGCGTTTGT
TGCAAGGAAGTAATAACAAGAAGATGGTTGTGTGTGATCACACGAAGGATTAGGTCGCCCCACAGTTGGC
ATACGAAATTGTTGAGTACATGCTGTGGGGTTTGTACTGAGCTATGAATATTAGTGTTAAACTGTATTTT
ATTCGCCGGTGGACACTTCCCTCATTGTCTCATCTTGTACAGCATGTTCTTATTCCTTTTACCTAGGCAT
TGATGGTGCTACAGGTGGTCATTGGATCATGTGCTTTCTTAGGGATTCGATAACCTGAGTTGAAAAATGG
TTCCATTAGAGAGCGGCGTGATCTGTAGAGACTCATTATTGCCTCATTCTATATACGCAAATCCTGGATT
GTTGAACCTAAAGTGATCCTATGCAAGTTTAGATTTGATTATATGACTCCCTTCTGCTATTTTTATCCGC
GGCCCCTGTTTGGCATTGCTTCAGGGTTAAGCAAAATTTGATTTTTTGTTTTGTTTAAAATTATTTTTTT
ATGTTTTGTTGTACTATATTAAAAATGAGTTTTAAAAAATAAAAATATATATTATTTTGATACATTTCTA
GATGAAAAATACTTTGAAAATTGCACCGCTTTTCCTTAATTGTTTTAAAATTTTATTTTATTTTACTTAA
AATTAATATTTTTTGATGTTTTTAGATTATTTTGATGCGTTGATATTAAAAATAATTTTAAAAAAATAAA
AAATATATTATTTTGATGTATTTCTGAGTAAAAAGTATTTTGAAAAGCAATCGTAATCACATTCTTAACG
CCTTAAAACCGGTTAATGGTAAGGGAACGAAGCTCTTATTTATCATTGTGTTAGGGTTAGGATTTGACAA
AAATTAATTTTTTTTTTATGTTTTCATGTATTATATTAAAAATAAATTTTAAAAACTAAAAATATTATTT
TAATATATTACTGAGAAAAAATAATTTAAAATAAAAATAATTATTATAATATTTCCAAACATTCTCCTAG
TGGATTAGGAGTGGCACGCTCCTAATATAAGGTCTTGCAACAATATTTTGATTGGTTGAGGATGTGTCTA
GTGAAATTTCAAGTTTTCCTTTCATACATAAATATATTTATTGACTTTTAAAATTGTCTAAAATTTACAA
GTTAACTTGTGATTTCAATAGTGTTGCGTGGAATGCCATTCATAATATTAAAAAAAATATGAAAATTGTT
AACTTATTATTATTATTATTTTATTTTAACTTTTGAAAGAAAAAAAGTGTATCAACGGATTGATGAGATC
ACTGATTCGGCAGAAAAAATAATAGTAAAAAAAAAATTGCATTCTTCATGCCTGAAGTCTGACAGGAGAC
TGAGCTTGAATTAAATAAGAGCCTGATAACAATGACGCGAGGCAAAGAGTTTCCAAGTGCCGGGATCAGA
AAGGCCCGATCCCGAAATGGGAAACACACCTCCTATTTCCAAACAGGGTGCAATCTCCAACTAACGCAGG
CCACCGCGTCGTGTAAACGGCGTAACAAGGGTAACCATCCATTAATAGGCAACCACATGGTCACAGATAT
TGACGGCGTATTGGACAGTTAAAAAAAAGAAAAAAAAGGAAAAGGATCCCGTTACGTCCTATAAATACAC
ACCATCAATCTCTTGGAACGTGAAAATATTTTTCCCTTAAAGACAGCTCCTCCTCCTACTCTTCAATTTA
ATTCCGCTTTATTCTCTCTTCTGAGGTAGATCCCTCTCTCCCTCTCTCGGCTCCTTGATAGGCAAGTGTT
TAACGATTCCGAAATTCCGAACTTTAGATCCTGATCTTGTGTTCGATCACTCTCTTAATCGAATTGTTGA
ATGTTTGTCTGTTGGATTCTACGTCCTGATCTAAGATTTAGAGCACGATTTGGTTTCGGAATGGCTTGAT
CTTGATCATGATGTGGTGTTGCCTTATGGATCTTCATATTATGATTATGTTTTTGCATGATTTGAATCAG
GTGATGATACCTTAGATTTGGAGATCACTAGATGCAACACATCCTGTTTGGTACCTGATCTGTTAGAAAT
GCATGTCTAAGCTGTCGTTTTAATGTGTTTTGAATTGAATATCTGAGTCTTGTAGGTTCATCGTGATTTT
TTTGTCTTTCGTATGTGTTGTTGATATGGCTCATTTATCAATTAGGTTTCTGATTTGTGATTGTTTTTTG
AAATGTGAAATGTTTTAAATGAAGCTGATTGAGATCTAGTTTTTGATAATGGTGTGGAATTGCATTTGAT
TTAGGCTGGGAGATTTATATTTAGTGATTTGATTTTTTGATATCGGCAGACGTGAGAAA
Sequence ID: 99
Sequence Length: 3500
Sequence Type: DNA
Organism: Poplar sp.
AATGATGTGTTGTTGAAGTTTTGGTTGTTTATGTGCTTATCGACGGTCTTGTGCTGGCTCGTTGAATTCC
ACCAGCACATAACATATTCGTAAGCTACATTAATGAACCCACCTTGTCTTTCAGTTCTCCTGTCTTTGTG
AGGAAAGCTTTCAACGGTGCGGTGTACATCATAAATCTTATATCCACTTTCATGTTGTTAATGTGTATGA
TTATATTTCGTGCAATGCATGTATTTGTGCATAGGTGGAATTTGGTTGCATTTTTTTTATGCTGATCAAT
CAAGGATGTAGTTAAAGTTGAATTTGATTAGATGCCTTTTCATTTGCACACAACAAATACATAAGCTATA
TTGAGTAGAGCCATCTTGTCTTTCATGGTTTTTCCTCTTGTTGGAATGAGGAATGACAACCCATTATATG
GCAGATGTTTTGTTGTCTGTGGTTGTAAATGTTGTGTGGTTGAAGTTTTGGTTGTTTGTGTGCTTATCGA
CGGTCTTGTGCTGGTTAGTTGAATTCCACCAGCACATAACATATTCGTAAGCTACATTAATGAACCCACC
TTGTCTTTCAGTTCTCCTGTCTTTGTGAGGAAAGCTTTCAACAGTGCGGTGTACATCATCATAAATCTTA
TATCCACTGTCCTGCTGTTAATGCATATGATTATATTTCGTGCAATGCATGTATTTGTGCTTACATTGAA
TTTGGCTGTGTTATCATTTATGCTGATCAATTAAGGATGTAATTAAAGTTGAATTGGAATGATGTATATA
AAAAACAACCTGCTCATGTGCTGTCTGTCACCCAGGAGACATTTTCCGTCGTTCTATCTTAAATATTTTG
GGCATTTCATTTTTATCATGTCACATGTTTGATGGTTAAGGAATTGTTTTCAATTTGCTTTTCTAATTTG
CACAGATCCGACCATTGTGGAGGCATTATTTCCAAAACACTCAAGGGCTCATCTTTGTGGTTGATAGCAA
TGATCGTGACCGTGTGGTTGAAGCTAGGGATGAGCTGCACCGGATGTTGAATGAGGTAGTCATAAGCTTT
AACTCTCACTTCTTACTTTTGCTTTTGTGGTTATATGCTTTTTAATAATGGAAATTTATTGTTTGAATAG
GATGAATTGAGGGATGCTGTGCTACTTGTGTTTGCAAACAAGCAAGATCTTCCAAATGCTATGAATGCTG
CTGAAATTACAGATAAGCTTGGTCTTCATTCACTCCGTCAACGCCACTGGTAATTGATAACATCTCCATC
GCCAATTTCTCGATAGTTTGCTGCTATGTAAATATCCGTGGATGTCATCTGAGCTGTGTGTTTATTGCAG
GTATATCCAGAGCACCTGTGCCACTTCTGGTGAAGGTCTCTATGAGGGACTGGACTGGCTCTCCAACAAC
ATTGCTAGCAAGGTAGGGTCCTAACTCGTGTCTTGTAAGAAATAATGATAAAAAGTCTTCGGGTTTTGTT
GGATGTAACTTTGTCTGCTGAATCGTGGCAGGCTTAAGAGATGGGTCGATATCTGCAGCTTTTCGGGCAG
CATTCTGCTTCAATTTGGGAGACATTGTTAGGTTGTTTGGTGTTCAAGGATTCCTTATCCTGTGAGGTTG
TTAAGAGAAGAATGTATTTGTTTGGTTTTGTAAGATATTGTTACCGTAATAGAAAGTGGCAAATTATCCC
TAATAGATACTAAAATAATTCATGATTCACAGTTTTTAACATGATGTATCTTGATTCAAGTCAGGTTCTG
TAATTCATGCTATTGGGGCTTTTGTAGAGTATGGTTCTTTCATTGACCAGCCATTGCTTGATTCCGGCGG
CTGCCATTTTAAATTACAATAATGCTGTAAAACTTTGACCGAATGCATGTACATCTCCCGTGTTGACAGC
TTGCCAGTCTTCAGACACGCATGTATTTACATCTAGATTCTGTTCATGGCACCAGGAAAAGTAACATGGA
AAGAACCGACTTCTGAGAGAAATTTCAGTTTGTGCCTCTCTACATCATGAGCCTAACTTTTCCTATTTGG
CCGGCCAGCTACTTGCGTTATTAACGATTCAATGTTTTTTATTTTATTTTATCAATTCCAATAGATTTAA
TATCCAGCATAACCCAATCTAAATCAATTCATAGTTAATTTGTATTTCTTCTAAATTTCTAATCTAAAAT
TCATGATTTCTACTTGAAATACTATTCAAATTGCAAGAAATTGCTGAAGTAGATCTAGAATCCCCTATAA
GATATTATTCAAGTCTTCGAATCTCAATTTCTTCCTTGTTATCGTGACTATGCAACCCCTCTGCTTTGAT
TATTCTGCTTCTCTGATTTTTAATTAGGTGTTTAGAATTTTCCTATCTTCCCTTTTGTTTGCGGTTGCCG
GAAGAGAAGAGAATCCCCTCTTTTTTAGCTAATTTACTCTTTTATCTCTTCTTAAGCATAATATGATTTT
TCCTTCCTTTTTTTTATTTTTTTTTTATTATTTTCTTGATGCCGCACTGTTTTTATACCTCTTTCAATTT
TATTTTTAATATAAAAAAATAATTTTTCTAAATCTTAATTTAATTTTTTTTATTAGTCAGAAGTTTCAAT
TAACACTACTTACTCGTGATCAAAATCTTAAGGTTCTATAATCATGGTTAGAGGTATCAATGAACATTTT
CCTTCCTTTCTTTCTTTTCTTTTTTTCTTACCAATTGAACTCAATTTAATATTAAAAATCGACAGAAGTT
AGCTACTAAGTAATCAAAGATAACACAAAAAATAATTAATTAAATTTAAAATACATTAATAAAAATAAAT
AATGCACACAAACACAATGGTAAAATTTAATATTTCTGCCAAATTAAATAATAAATGAAACTAGTAATTA
GAAATATAATACATCCACCGTCCCAAAATAAAAGTACGGTCCAGAAACTGAATCTCACTTTGACACTAAC
GTCATTAACGGCGTTAACTCACGTCCATGGCTAGATTCTATACGCACATAGATAAATATCCCCTTCTCTT
TCTCATTTCTTTCATCTCCCATCTCTGCACAGCTTCTTAGTAGATCCTGCCCTCTCTCTTCGTCTTCGTT
CTGTAAGTCGTCTCTCTCTATATATATATTGTTGATGTTATTACTGTAGATCTTGATTGGTCTTATTTTG
GTTCTAAAGTTTGTTTTTTTGTTTTTGTTTTAAAGGGTTCATAGATCTGACCCGTGATAGATTAGATCTG
TTTTGGGATGTTTGTTGAATCTTTTGACGACCCTTATGCTTGTTTTGTTAGTTGGTATCAGCATAAGGGA
GATCATGAATCTATAGAACTTGGGTTTAGTATGAAATAATGGAAGGGAAGTGAAGGAATTGAAAGGAATG
GGGTTTTTAATTTGTTAAAGTTTGGATCTTTTGGATCTGTTGATTTTTCTATGATTTGTGAGATGATTTT
TCTTTTATTTAAGTCTGAATTTGGAGTTTTTGATTTACTGATTTGTTTTTGATGCAGGTGAGAAGGAAAG
Sequence ID: 100
Sequence Length: 3114
Sequence Type: DNA
Organism: Poplar sp.
TATATATATTAAAAAAATAAAAAAAATAACTCGAGTCAATCTGAATTCATCAATTACCAGGCATTTTCTT
GTCCTACCTTATTGTAGCCATTAAATATGCTTGTATCATGAATATAAACTAATTCCATTTAATAAGTTGG
TCAGTTTTTTTTAATCATATATTTAAGAACAATGGTGGTGCTATCAGAAGGAAGCTGAGAACACAGGAAA
CTCAAAATAGAGCCAATGAACCCATGGTTTTGGCCATGTGCAGATCAACTTGGGCACGTCTGTATATGCA
AGTTATTTATTTGCGAGACGTGGACGTTGTCTGATTCAAAGTTGCAACTAGAAATTTAGTATTCGAAGCT
TTACATTATTTTAATTATTATAAAAGATACGTGGTATACAATGCCTTTTTACAAGTAAGGAAGGTGTGAC
GACGACGTCTTGGACTTGGAGTTGCTCCCATATAAAATTATATTAATAAGCGAGATTTCAAGATATTATT
TATATAATTTTTTAATAATTTTAGATAAATTTTTAATAATTCATAAGAAATCTTTTTTTTAATAACCTAA
ATAGTAAAATACAAGAAAAATTTATTAAAATTCTAATTAAATTAAAAGTTTTAATCTAAATAAAAAAAAT
CTTAAAACAATAATGAAAGAAAAGATAATTAAAAAACAATAGCTTCTTAGCCTAAAGCTAGCGGAGGGGG
CGTGCAAATGCAATTGCAAAATTGATAAATTTAAAAAATAATTGTACTGATAAATCGGTTTTTGGTAGTT
GGAATTCGTAAAATTAACTTTGAACGATATACATAAATTCAAACTCATCGTGTTTCAAAATTCAAGTCAA
CTTGTAGCAAGGGAAACATTGTAATGTAATTTTTCATATTAATTTTTATTTAGTGAATTGAAGAAAGGAT
TGAGAAAAGAGTCACGTATTTAATTGAGTGCCTCCTTTTCCTATTTAATACTTCAAGCTTTGGTTTTTGA
ACACCACTAGATAATTTGTATGCTATATGTTTCGGATTCGATTAATATTAAAAGATATCTAAGTGTTGAT
AACATGTTTTCTAATATAAAAAAATTTAAATTATATAAAGGTTGATTCGGTTAACTTGATGGACTCAAAT
TCAAACCTCGAATTATGAGATTGAGATAACTCTAATATAAAGTTCAATTCTCAATCAAATCGAAACAAAA
TATGAAACTTAATTTCTAACCAGCCTTATATTAAAGTCTAGAACTAAAAAAGAAAATTCAATTAAAAAAG
ACAAAAAAAAAAAACAACTCGAGTCAACCCGGGTTCACGTGCCAAACTCGCAACCCAGGTCATGTGATTG
GGATAACCCTGTATAAAGCAAATTGAAATAAATCATGAAACTCGATTCTCAATCAACCCAATGTTGAATA
ATAAAATTTAAAAAAATCGATTAAAAAAACTTAAATCAACCCACCAAACCCGTGACTCAATCAATATGAA
GTTTAATTCTAAATCAATCAAATATTAAATAATGAAATTAAAAAAATAAATCGATAAAAAAAACCTCAAG
TTAACTTGTCAAACCCGTGACTCAGGTTATGAGATCAAAATAAATAAATTTAATGTTAAAGGATAAAATT
AAAAAAAAAAAAACATTGTTCAAGTAAGCGGTTCTATGTAAGGAGAGTACCAACGAATTTCTCTTCAATT
AATTTTTGTCAATATTTTAGAAGTGTAACATTTTAATTTTGGGGTTTGGGGCATTTTTCCAAAACTATTT
TGAAAGCTTTTAGAAAACCAGCATCAATTTTAAAAAAAGTTTTAAAAATTTAGGAGTCATTGTTACTCTA
TCCTAACCCATTTGAAAATATTTTTTATTGTAAAAAGAAAAAATTGTATACTATCTTAGATTAACTACAC
AATTATTCATTTCCCTGAAAAGCAAAGAGGGATTTGGATCCTCTCATAACCCTAACAAAATATAACTAAC
CATGTTTTAAATTTCATCATTAATTTTAAATTTAGTATTTTAAATCAGACGAGGGGAAAAAAATAAAATA
CAAGTTATTATTAGATAGGTTACACGCGTTATGAAGTGATAAGATCAAATTTTTTCTAATATAAAAAAAA
TGTTTAGGCGAAACTAGCTTTTTTAAAAAAATAAGAAAAATATAAAACATGAGTCATTGACTTGACTAAG
TTCAATAAACTCAATTAATTTAATAATATGTTTAAAAAGAACATCGATAGTGAATAAAACAAAAGAAAAT
AGCAATAAATAACTATAGAGAAAGGAATAGCCAATATTGTACTCGATGAGAAAACAAAACAAGCTCATTA
GAGACTCGTTACTAGAAAAATCTCATCGAGATGGTTATAATGTTATTGCGAAAGGGCGACGATATTGAAA
AAGATTGCACACACCGTAAGAGTAACAACCTAAAAAGCGAGCAAACAAATATCATGAAGTGAACATCTCA
TGTTTATATTTCATTAATTAATTTAATTTAATTAAAAAAAATTCTTTTAAAAAAGCTAAATTTAAAAAAC
AAAAAAAAACACATAAGATAATCCCTTAAATCAAACGGTCCTCCTGCAATTACAACATACCGTAACTGTG
AAAACCTAGTTCCTTCCACGTCATACTAAGACCCTGTTTATTTTTGCGTTTTAAAAATATTTTTAAAAAA
AATTAAAATTTTTTATTTACTTCAAATTAATATATTTTTAGTATATTTAAATCATTTTTATGTGCTATAT
TAAAAATAATTTTTTAAAAATATATATTATTTTAATATATTTTAAAATTAAAAATATTTTAAATATTCAA
ATTTCAAAACATGTACTAAATATCGTCTCCTCCCATGCAAATTTTTCACAAGCAGACAAAACCACCAATA
AAGAACCCACAATCCTTGTCCATGTCATATCTGACGCCCGAGAATCATCGCCCCTGTGGCCCCCACGTTA
CATGTCCCCATTGTACTATACAACATCATAATAAAAACTCCCCAAAATAAATGAAATTACGAACATACCC
TCGTCAATTTCCCTATAAATCCCGACGCCTCTCCCGCTGATGATTCCATGTCCAAAGCTGTGTGTATTTC
TTGCAAAAGAAAATAATATTTTTATTTTTAAAAA
Sequence ID: 101
Sequence Length: 3058
Sequence Type: DNA
Organism: Poplar sp.
AAGGAGTATAATTTTAAACGGGAAATTATTTTCCTTCTTTCCTTTTCCTTTCCCGTACTTTTTTTTTTAA
AATATATTAAGATACACATTTACCTATCTTCAATGTTTATTAACATTCTACATTATTTTCTCTCTTTCCA
CAAGCACACATTTCTGTCGCATAATAAACCACAACCATTTTGAACTTGTATTATCAACAGTCTTTCCAAA
CATTTCTTGACTGTCTTTCGAAGTTCCTTACCCTTATGACTAAGATCCGACCAAAAGATTAAATTTCTTT
GGGATACTGTACACGTAAGTTATTATAAAATGGCTGCGCTCTTCCATATACATTTTTTAAAAAAAAATCT
CATAAACCCTTGTACATATATATTTTCTTCCAAATAGATATCTAGAAGATATATAATTAGGGTTTGCATG
AGGTAAAATTGAAAATAAAAGTTACTATCTAGTTTTATAATAACTAGTGACTTTAATTGGCATTTAGAGT
TCTAGGTAAGAGACTGATTATTTAACAAGAAAGATAATAATCATCATGTACATTTTAATTACATAAGATA
AGGTACATGTTATGCTCTAGCTAAAGTTTTTCTAAACTAGTATATGTGTTGTTATTAAAAAAAAAATTAC
GAAAACTTTAATAATGATTTGGAACATAAGCCTGACAATAAGACTTAGTCCTCATTTTTAGAATACATAT
TGAACTTTAAGTTGATTATGTCCAAATGAACTTAAAGCCTTCATTCACACTCAATAGGTCTTGGTAGGGT
TATATTCACCCAACTTAGGTTTACTTGCAATGATGGGGTAATATCCTAACACATCTAAAATTATAAACAA
ACATTGGTATACATTGATACTACACATCGAGTAAGGGGTTGGTTATGCTTTGGAGAAGATAGAAATCATC
TTTCTCGTATCTTTTCAAATGAAAGGTTATCTTAATTATGTGTTTTGTTTTAAATTTATTTTTACACAAG
CAATTATTGTCCAAATTATTTTCTAAGATTATTCGTAACTGACTTATTATTGATTGATGTTCGCTAAGTC
TGCATCAAGCCCTTAATCAAAACTCTCGCTAATCAATAATTTATTTTTTATCTTTTTTTTTATTATTAAT
TAAAAGCACTACGCTAGGCCTAAATTAATTTTTAAAATTAGAAGACTTGTTGACCTAACTATTAAAAATA
AAGTTTAATTAAACACATGATATTAACTTGATGAAAACTCTTCGACTCATTTTGAAGTTAAAAATATTGT
GCTAGGCCTAAGTCGGTCCTTAAGACTAGGAGATACGCCTATCTAGATGCTAAAACTCAAACTTTGATCA
AAACATAATGTTAAACTTGATGAAAACTCGGTGAAACATTTTTATTCTTAGTTTGAAAAATAAATATTTA
CACTCACATGAATACATAAAAAGGAATCAATGAAACTTTACAAAATGAAAGTAACACTATTGTGAAGCCA
ATAAAAATAAAAAATAATATAAAAACTGCATGAGTGAAAACTATATGATTTTTAAAAATAATTTTTACAC
ACACATGCATACTTAAAAAAGTGACAACACTGTTTTATAAAATGAATATAATGCTACTTTTAAGCCTTAA
AAATAAAATAAAATAATATGTTTGAATAAAAAGTTGTTGATTTTTGAAAATAAGTATTTACACACACATG
TGTACTTAAAAAAAGTGATAGTAGCATTTTCTAAAATAAATCTAACGCTATTGTGAAGCCATTAAAGAAA
ATAAAATAAAAAATACACGAGTGAAAAGTTATCTGCAAATTAAGACAATCGATGCATTAATTTAGAAAAT
AAAATAATGCTAGAAATGAGAATAGGATACAACATTAATTTTAACGACACAATTAAAAATTAATAAACTT
ATATATATATATATATATATATATATATATATATATTAAAAAATTAAATGTAAATTACAGATTGAGATGA
GAAATTAACTATTTTAACCTCCTGACACACTGGCCCCATCAGGGCAAGTTGTCTACGTGTCAACATCATG
CAGTTGTTGAAGTTGTGATTTAATTCGGTGATTGGATGCTCATGCATGTGAGATTTTAGTTATATATCCG
TCAAAACAATTTTGATTACTTGCCCTAGTTTGTGTACCATTTTTATTAGACCAAGAAGGGTAAAAATAAC
AGCATAATTTTAAAATTAACAATCATATAATTTTTTAATATTTATTATATTAATAACTACATGAATCGAC
ATAAACCCTTTATTTAGTTTAAGGAGGATAGATATAAGCTTTCATATGCCTTTTTTATGTTTTATAAGAT
TCCTGGCCGTCTCCCTCTTGAACGGCTTTTCAGCGTGAGGTTTTTTTTAGATTGTGTTGTTATTAATAAT
GCTTTCTCATAATTATTTTCTTATACGTGCTATTTAAGTGAAAACAAAACTACTTCTTAACGGTGAAATC
CGAAAAGAATCTTGATAAAGGGTTCAAAATTATTCCGACAAGGTGGGAAAGTTGTGGTCCCTCCATAAAA
TAACACGATGTAAAAATAATTTTTTAAATTTTTTTTTAATTTAAAAATTGTATTACATTAATTTATTTTA
AAATAATAATTTTTTATATAAAACCATCTAAATAACAAATAAAAAAATTAAATTTCAATAGAAAGCACGT
TAAACCTCAGTTCCATGTAATATATTATCTACTTTTTTTTATCAGAGATGTGTTTGGTATTATAATTTAA
AAATATTTTAATTTTTTTTTATTTTTTATTTTAAATTAATATATTTTTTTAATATTTTCAATGATTTTTA
TATATTGATATTAAAAATAATTTTTAAAACATAAAAAATATTATTTTAATATATTTTAAAATAAAAAATA
TTTTAAAAAACAATTAATATTATATTCCCGTTCCTTACCAACCAAGTTGGTAGCTGGCCACAAAACGAAG
GGCTATTTGGTAACTAACAATTCTTATGCCTTTTATAAATGATGGATACTTCATACTTGCAAACAGAGAA
TTGGCACCAGAGAGAGAGAGCCTTGTTATTTTTTGACAGAGATCGAAG
Sequence ID: 102
Sequence Length: 3252
Sequence Type: DNA
Organism: Poplar sp.
CCTCATAAGCATCATGGTGCTCACGGCACATGATCTGGGAGTGAATATCTGCTGTTATTGAACCATTGTC
AGCTTATGAGCAATGTTCTTTGGAGTGCTTTGGTCTTGCTTTATGAGAAATTGTATTGTTTTTAGCTAAT
TAGCCAAAATCGATTTTTCTTTTACTAGTAATGAAAGGGTGTTTATATAACAGGTGTAGCCTAACGATTG
GATGTATATGTAGTTGCTTTCTTTGGTGAAGCAGGTTTGAGTCTTGGTGACATTTATTTTGGTTATTACT
ATTTTACTTCTTTTGCAGCGCTACAGGTTGGGCCAAGTATTTTTTGAACTTGTGTAATTTTTTTTATAAA
AATAAATGAGGCGAATTGTCGCAGACGACAGCTTAAAATTCGGCTATTATTTGGTGGTTGGAAAATTGTG
AAATATAAATTTTCGGTTGATAATTAATTTCCAACTATTTTTCATCTTAAAATATCTAATAAATACCATA
AAAATCTTTTTAATTCACATATTAACTTTAAAATCATTAAAAAAACCAAAATCAATTGAACATAAAAAAA
TAAAAACAAAACTTAATACTCACCACAATCAAACTCTTCTTCATTGAATAGAATTAGTAGACACTAAATT
TAATCATTTTTGTTATTGGTATTATGATAATTAACCCTTTTTTTTTCATAATTTTCTCTTATCTCTCTCC
AAGTCAATAACTGAAAAATAAATAAAATAAATTTTTGAACTAAAATAAAAATTATTGTAAATTTAAGGTG
AGTGATGTATTTTCTCCATATTTTAATTTAAAACTTAATTTTATATAATTAAATAGTAAAAAAATGCAAT
TAAAAAAAATATTAAAAAAAATGGCAGGAGATTCACTGTTAATATAGATAGTGCCTGCCCTTCAACTTTT
ATTAGTTTTTATTAATGTAATAGATTTGAAATCCGACCAAAAAAGGGTTGGATTCTAAACGCTTTATAAA
TCAACTCGAGTTAATTATTTTTTATTAATATAATACTATTTTATTCTTTTAAAAAAAATACTAAAATATG
GATTAGATCAACAGAATCATAGTTAACTTTTCATGTTAATCGAATTTAGACTAGCCAATTTCATCTTTTG
TTTAAATTGAAATCCAGGCATGGCTTGATTATAGGTGGTGGGTTTTCCGAGTAAAACCCATTGGGCAAGT
TTGAGGTGAACTTATTGGAGAAATAACCAATTTAGGTCCACCAGATCTTTAAATGCAAAATCCCAAACTC
TAAACAAAGTTATGTCACTGTGTTTTCTTTTGGTAGAATCTCTTAAAGAATTTTAACAGTGTGTTTTTAT
ATTGTTTTTTAAAGTATTTTTTGTTTGTTAAAATTAATTTTTGATATCATCTTATTAAAACAATAAAAAA
ATATTAAAAAATTAATTTAAAATAAAAAAAAAAAAATTTTTAAAAAAATTCAACTACACCACAAAAACAA
ACACACTTGACACACCTAACAACTGTTTTTCGAAAAGGTAATGGAGACTTCAAAGATGGATTCCCATGCC
ACGTTAAAATCAGGAGGAAAGACTTCCTTTTCTCTTTCCTGTGCTTCTCTAGAAACTACTTAGATGTTTT
CTTTTTTAACACATGTTTATCCCAAAAAATGAGAATTTATATTTTTAGATCAATGAATCGTGGACGTAGC
TCCAAAGATTTTCTTTTTCATGAAAGTAGGCACCAATTGCTTGCAAATTGTTTTCCAAAAACTATACTCA
AATTATTCTTCCCACCAAGACTTGTCCAATCATTTTTGGAATTTTTTCTCAAAAATATCATAAACAAAAT
CTACACTTTATATTAAAAAAAAACTCTTGGAATTGCAAGATTTGCACCAAGAAATTCAGTAGATATTTTT
GAGTGACAATTAGCAAACTTTGAAATGCTAAAATTAAATGAGAGCGTTTGGAAATGTGGTTGTATCCGCA
TTTTTAAAATTTTAATTTTTTTTATTAAAAGTTAATTTTTTTTTTGTATATTTTGGATTGTTTTGATGCG
TTGATCTCAAAAATAATTTTTAAAAAATAAAAAAAATATTATTTTAATATATTTCAGCATGAAAAATATT
TTAAAAAACAATCACAACCACAATCCTAAACAGGTATAATATTGCAAAATGAAAAGGGCATATGATTCAT
CAAGCGAATTAAATCCCAATTCAAAAGTGGCTTCAAGCGTATTGTCTTCCTTTATAAGTGGAGCCATGTC
TTCATCAAATTGGCTTGAAAAGTCAATATCCAACCGGTCCGTTCCTACAAAAAATTGAGAAATATATAAT
TTAATACTAATGGGTGCACTTCTTAAAATTAATGAAAATATACCTTTTTTATTGTACCTAATTAACATTT
ACAATTCTTACTCAGAGAATTGATTTTTTTTCTTAAAGGGTTTTTTTTAAAAAAAATTAATTGATAATAA
TTTTATAATTTAATATAATTTGGTTCAATAAAAAAAAGAAGGAAGAGGGAGAGATTATTTTCCCTCAAGG
CTATTTTTACAAGCCACGAGTTTTTAAAAACGGAAGTACATAATCCTCCTATATATATATAATACAAAAA
AAGAGAGAAATTAAAAAACCAAGTGGAGTAAAGTAATTAAATAGATTTTGATGGCAATTGGTTTGTTTTT
TCGAGTAAAATTCAATAAAGGTGGTATTATTCACTAACTATGTCAGAAAAAATAGAATAGAATCCTTAAA
AAAATTTTCGTTTAATTTTTATTTTTAGAAATATTAGAGACTATTTTTATATGAAAACAAATTAGAAATA
GGATTTTAGGGTTAAAAAACTCTAAATTATGCATGATACTACAAGTTGTCTACCGCACATAAAATGACTT
GTCAAAAAAAAGAAAATTAAAAAGAAAAGAAAATGGAGTAAGGTAGGCGTAGATTAAAAAAAGAAAAAAA
AAGAGAGAGACGCAACATGATATATGAATAAAAACCAAAGTTGTTCTCGAGAACAGTCTCGCAACCCTCA
GTGTTTGCCATCTTGGAAAAGTTGCAAGAAGAATTGTAAACGACTACCTCTCTAGGAGCCAATAATATCT
CAGCTAGCCGTCCCCTTTGACCAAACAAGGTATGACCATGCACCTCTATATAAATGGTGGATACAGAATA
ACAAAACCAAGATAAAAGCAGGAAACAGAGGCTTGTATTACTTTGATTGGCAGCCATAACAGCAAACAGA
TAAAGGGATTTTGTATTTTTTTGATAGAGAAG
Sequence ID: 103
Sequence Length: 3141
Sequence Type: DNA
Organism: Poplar sp.
AATTGAAACGTCATGCAAGGAATAAAATATATTTCAGTGCATAAAATTTAAGATTTAGCAATTAATCATA
GAAAAAAATGAATTAAAAAAAGCCTGCTTTTTTCTAACCTAGGTGGGCCCATGAATTATCTATCTTCCAG
GTCTTTAATGATGTGGTCACAGAAGTCAAAAGAGAAAGATAAGAACAAAATTAAAGCAAATTGATGATGC
CTTTGTCATTTCCACATGCGTGGGTCATTACCCTTTTACTACTGAAAATTTAAAAGTTCAAGGGCCCATT
AAGGCCCACAACTAAAGCCCTTTAGATTGCCCCCACGCAGGATCGAACTACGGACCTTCAGTTTACAAGA
CTGACGCTCTACCACTGAGCTATAGGGGCTAACTATTAACCTTATCAATATTTAAGCATTAAACTCTTTT
AACACCTTGTAGTCTCATCTCCTGTGTGAGTAGACTATCATTTTTTTAAAAAAAGTGACAGTATATATAT
ATATATATCTTTTTTTTTATTAACTAGATTTTTCTGGATTAATATCGTATTTGATTCAACTAAAAACTCG
AAAAATTATGACTACGAACATTATTATAATTTTTATATTCCAATAAAAAACGAGAGACAACAAAGTTATT
TCATACTCCTAGCATGAGATTACTTACATATGTATGTGTAGTAACAGCTAAAGGATCAAGGGATTTCCAT
ATTTTCATGTTGTAATTGTGTTCTTGACAATGTATTAAGTGATGGGAGGATCAATATTTGTGTTGCAGGA
AGAGTGCCACAGCAACAGAAGAAGAAGCCAGGAGGAGAAGAGGGCATCACCAACATTAGCTTCTTCGACA
GGATCATGAGCTATGAGAATATGGTCCATGGAAAGGGCCATGAGAGAGTAGTTTCATCACCTTTATGGAC
AAGCAAGGCCATGATAGAGAGTGTAAATGAGGTGTGCAAGGATATTGCTTGGGGTGAGAGAAGGGAAATT
GGAAGAATAGGGATGGCTTTGCAAGATTATATATGCAGGGACTTGATTGAAGAGATTGTTAAAGAATTGG
GATTTGACTGCATTTATCAACTAGGTCCTCTACCGTTTGAATCGTGTAAGAAAAGACTACGTTTCTAGTG
CCCTTAGGCCCCCCTTACCATAGTTTTTGCACTGACCACAGCCTCCGTTCAAAATAATTTTTTTCTTCGT
TTGGTGCTATTTCTAAGTTTTTTTCTTTTTTTTTTCTTTAGAAGTGTGTTGTTTCTTGTTTGATGTAATC
TAGAATTATTTTTTTCTTTTTATAATATCGTGTAATTTGTGATAGCATAAAAAAAAAAATGAATGAAAGT
GTTAAATTAAAAGAATTATATTACATTTGTATCCTGGTATTTATCACTATTATTAAACTTGATATTAATC
TAAAATTTAAATAGGGTTAAGTTTCCAAAAAAAACTATTAAAAATTGATTTAGTCATATTAGATACGTAT
TAGGATAAATTACTATTTAATTAAGCTAGTTAAAACCTGGTTTAAGCTTTTAGATTTTATTCAAAATAAT
ATTATTTTTTATTTAATTAAAATATTTTTATTTTTATTTATTCAGGTCAATTCATCTGACTGATAATTCA
AATTACAAGTCAATTTATATTTAATAATTTTAATATTTATATGGACTAAAATTTTCTATTACCAGACATT
AGGTTTGAACGAATACGTGCTATTTTGTATTCCATGAGATCTGAAAGCTTATAATCCAATGAATTTAACC
AAATAATTAATAAATAATAAAAGTTGAGGTGTCCAAGTTACATGGTGAGTGTGATGTTTTAAATAACTAG
GAAAATACTATCACTACCAGTCTACCAGCAAACGACATGCTAACATTGATTCGACAAAGCCGCCTAGGAA
CAGTGCGATAGTGAGGGCGATGGAGAGATTACGTGGCGGTCAACGCGAAACACGTGATGTCATCCTCCGC
GTCCACACCGCGTAAACGCGTACGTTACCTTTTTGCCATTTTTAATGATTCGCTATACTCACCAGCCGTT
TCACCGAAAATTACTGTCGGCCAGTAATTATTCAGCAAAAATTCTTTTAAGGATTAATGAAGCTTACGTG
GCGTCTCGTGAATGGGGGATACTAATAATGGCTAGTAATTAATGTCCTGTTATTTACAGATCTGTCGAGC
TAGCTCTTCTGCTCATGATTGGCTTTCTTGGACTTGATTCCTGCTGCTGTACGATTTTACCCCTATTGAT
TATTGTTTATGACAAGAGGGTATTTTCTTCAAGTAAGTGTTTAATTTTTGCAAATGACTGAAATACCTTA
AAATAATAGTGTACTATATAATGTATTTTTCAACAAAAAAAAAACACTCTACCATAGCGGTTTAATGGCA
TCTATTAAAAAAAATTGATTTTTTAATGTTTTTGTATAGAAATTACGTGTACAGAGACAACAATTGTGTC
TGTTTAAAAATGCGATTGTGGTTGTTTTTAAAATGTTTTTCATGCTGAAATGCATTAAATTGATATTTTT
TTTATTTTTTAAAAATTATTTTTGAAATCAGCGCATCAAAACGATCCAAACACATATAAAAAAATTTCAT
TTTTAGCAAAAAAAAATTAATTTTTTTTTGACTTTTCATCCTTTGTGATAATTAAATTGAACTTGATTTT
TTAAAAAATGTTAAGCTAACTTGACTTCCTTCAATTTATAAAATTAATAACTAGATATTGATGCATGATC
CATTATTCATAAATATTAAACATCACTAACCTTGTGTTCTTGTTCTTTACCATGAAAAAAAAAATAAAAA
AAAGCTAAAGAGAAAAAAATTCTTTTGAAGTAAAAAGCTTACAATGGAAGGGCATAAGGGTCATTTATGG
ACTAATCAATATCAATTTTTTTAAAAAATACGAAATAAAAAAAGGAAGAAAAGAAATGAGAGGGGCAAAA
TAGAAAGTGAAAAAGTGAGTTGGAATTGATAAATGGGTCACGTCCGACTAGAAGAAAGCTTGGGGTGGCT
AATTTAGCTCGTATAAGAACACCACATCTTTTGTCTGAATCTAAACCAAAACTCTCCCTCTCTCCTACAC
GCACGTTTTCTCCATCTCTCAGGTTTTTATCTCCTTCTAGGTTTCATTTTTCAAAAGAGAA
Sequence ID: 104
Sequence Length: 3186
Sequence Type: DNA
Organism: Poplar sp.
GCCGCAACACGTCGACCACCATATAACAACTGTTCAATCTAATATGAAGCAAATAGAAATTATTAATTCA
TAAACAAGATGCAGCGGTTTTGTCCAAACCTATAAAAAGTAACAAATACGTATAATATTTTGGATCCAAT
GTGCATATGGATAGTACTCCATCTCCTCGCGTGGAGGAACCTGCGCTGGGTTTGGTATAATGATTTGACG
TATTATACTCATAGGTGGGTGACTTATTTATTTTTTGTGGTAAGTTTGTCTCCCTTGAGTCACCATTGGT
GACCTTTCTTTGTGTCGTTGAATTTGTCTCATCGAGATATTTTTAATGGTATCAGTAGTGTCGTGATCAG
AGCTTCAGTGTGTCTTCGAGAACTTTTTTTTTCTCTCCTCTCTCCCACCCATTTAATAATTTTTTATGGA
TGCCGTTATTCTAAATAGCGACAAGTTATAAATGTCACGTTTCTCAATCGCGACATATACAAATTGTGTT
ATTTCACCAATTTTTTTCAACTATTCTATTCCTTTAATTTTTTTAATTTACTATCCTAATTTATTTATTT
TTAAAAATCCTCAAATGGCGATCTAGTTATAAAAAAAAAAAAATTCACATCGCCACCATTTTAACTCATG
CCTTACCCTAGCTCAAATATAAAACAACATAATGTCAAAGGATTAGTTCGCAAAAAAAAATATCCAGAGA
GTGAATTGAAAAGATGGGTTAACCTTCCAAACTCGCAACCTATCCTAGACCAGAGTTTAATCAAGAAACT
CAATTTCCAACCAATTTAATATTGAAGGATGAAATAACAAAAAAAAAAGTTGTCTAAACAAAAAGAATTG
CATTAAAAAGAATGATGATCAAATCACACACAAAAAAAAAAAATTGAAGGGGGGTGAGATTGTAAAAAAA
AACTTCAATTATAAAAATTAATTAAAACAAAACAAATAGCAATCAAAAGAATGTGGATCAAATCTGACAT
ATGAAAAATTAAAGGATAATGAAATTGAAAAACAAATAAATGTTACTAAAAAATCATTAGCCTAAAAAAA
GAAAAAAAAACAAGCGAGCCCAAAAAAATCCTTTAAAATTAGGTTAATCTTCCAAACTCATAACCCAATA
AATCCTAGATCCAGGTTCAATCAAGAACCTATCTCAATTCCTAATCAATTTAATATTGGAGGATGAAATC
GCAAAAATAATTTAAATTAAAAAAAAAGTTGTCAAAACAAAAGGAATTACAATTAAAAGAATAAGGATCA
AATCACATAGGAAAAAAAAATAAAAATGGATGAAATTATATATAAAAAAAACTTCAATTCTAAAAATTAT
CTAAAACAAGACAAATAACAATTAAAAGAATGAGAATCAAATATGTCAGATAAAAAATTAAAGGAGAATG
TAATTGAAAAAAATCCAATTCTAGAAAACATTTCAAATAAAAGTAGAAATAAAAAAAAAACATGGAACAA
ATATGAAGGAATAACAAATTGAAAGATTGCTTTGAAAATTTAGAGTAACATGTGTGGAAATCAAGGTGGA
GAGAAAAAAGAAGGAAAACAAGAAGAGCAGTCCATCAATGCCAAATTATAGATCAAAACGCCACACACAT
CGTCATTAAAAATAGTCCTCTCAAGATGATTTCAACCACACCAAAACAGCTCGTTGTTAATCGCTAGAAG
CTGCTACACGCGTCATCTAAATGTGATAGAACGCCCCACACACTGACACGTATATTGCAGCCAGGTTTCC
TTTCTTAGTAATATCTATATTTAATAATATACTAAATTGTACTTGAATCAACATATTGCACATGTCGGCT
AGGATTTTTTTTCTTTTTAAAGGTATGTTTTTGTAATTGTGCTATGCTAACAGTAAGGGAAAAGCAAAAA
TGACCTTAAACTATAGCTTATTAATTTTTTAAGAGTAATTGTACTTTGCTAAAAAAAAAAAAGAAGTAAA
AAGATGGAGTTGTCCCTAGTGAATTTTATAACGACTAACAAACCATTTAAAATACCGAATTACCCCTAAA
AACAAATTCCTTGAGTTTTTTTAAAATAGCAAAAAAATTATTACACCGTAATGGTAAATAATAAACTAAA
TCTATAACTACATTATTTTTGCTTTCCGTTTTAGGCTTTTTTGTTATACAATTTGAATCAAATTATTATT
TTGATGGCAGCCAAAATCCCATTGTGGTACAAGCAGAGTTGAAAGTGAAAAAGAAATAAAATAAAGATTT
TGAGCCAAGGCAAATTTGAAAAATCCAAAATGAGTGTTTTATTTCATAATTAGATTGAACTTGCTTCTAA
ACTTTGTCATTACTTCTCTGCCATGCTTAAAATCATCATAACTTTGAAAAATATGATTTATGATATATTA
AATTGAGAAAACCAGAAAAAAAATAATTAAAAAAATCAAATTATGATAATAAATCGATTAAAATTTTAAA
AAAACTTACCGGTTAAGTTTTGGTTTTATAAGTCTGAAACCGAAAAAACCGAACTGAACCGAAACTGGTC
GGTTTGAACCGGTTTCGGTTTTTTTTAAAAAAATTCAGTTTGATTATTTTTTTTGATAAAAACCAAACTG
AACTGAAAATGATCACCCTATCATAAATAGGTATCATTTCGTTCATTCATTTTGAAGAACCAGAGGTATT
TGATAAAATATTAAATAGATCATCTTTTATTAAAAAATAAACTAACGCATTTTAAGGAAAAAATAAATTA
AAAGAATTATTTTAATAAAAAAAATCAACGAATTGTGAGTTGAGTTTTGAACGGTTCATTATCAGCTTAA
TTGAATCAATTCAAGCCTCGGGTCGACTCAGACACATCAGAAAACGGGGAGCTGACAGGGAAGAATAGTG
AGGGGTAAAACGGTAAAGGTCAAAGACGCGAGTCGAGAGAAAGGGGTTACACGTGGGGAAGAGAGAGAAT
CAGATGCGGAACACCCCAATGAGAGCACTTTAACTTTAAATTAAAAAAAGGGGCCCACGTAGGCTTATTC
CTCTGCCTATTTATTTTTCAAAGCCAGAGTCAGATCAAAGCAAAGACGTTCACGCAGAGTCGGATCAAAG
CTAAAAGAGGCAGCGAGCCAGCCATCAGATATCGTCATCCTCTTTGATTTAAAGCATTTCTTACTGTTTT
TATTTTCTCTGATATTTTCTCTCTCTCCGAACAAAG
Sequence ID: 105
Sequence Length: 6250
Sequence Type: DNA
Organism: Poplar sp.
ATCAATTGCCTTAGTCAATTGGCTAATATGATAGATAGTAAAATCTGTCACAGAAAATTTTTTTACACAA
CATCTTCACTCAATAAAGGCTGTCTATGGATTTTGGAGAAAAAATGATAATGAATGGTTCATATTGATTC
TGTTATCATATATTTTTCTTTTGGTTCTCCATCATAATTTGTGCCCCACCCCCCCCATTCAGCTTCGGCT
TGCGGCGGAGAAGTATGAAGAGGCAGAGGCAAGAGCTCGGCAGCTCGAGAGACAGGTACTTTTCTTGTGG
TTGACAAGAAAACTATTGCGTGAATGTGTCTGCAGATTCTGATGGAATCTGTTCCATTCTAGCTATTAGG
AAATTGAAAGCATGTTATATTCATGTTGGTGAAGTTCAACTGTGCAGATTTTTGCTGCAGCATGTATTTG
AATTTCAGCCCTTAGTTGATCTTTGATTCCATATTTTTTGTAACCACTGTCTGTTTCCTTTGCTTTCTCC
TCCTATTCTTGGTTGCTAGCATTTAAACATTTATGCTGGCAAGAGCATTTTGACATTCCACACATCCCCC
TCGAGCCAGTCTCATGCTATGTTTTTCTTCAGGTTGCTACTCTAGGTGAAGGTGTAACCTTAGAAGCCAA
ACTTTTAAGCAGGCAAGCATCAATATTGAAATTTTTATCCCTCACGCCTCATTGTATTTTAACTTTCTAA
TTATCATTATTTGTTTCGTTTCACCAGAAAGGAAGCAGCTCTGCTACAAAGGGAGGTTCGTATCTTTAGC
AAACATTTCATGTTAGTTTGGAACTTCAATATGCTTGTGTTTTTTGTAGTTATCACAATGCACTAAATGC
CAGAAGGTAGATAGAAAAACCCCCTAGAGAAAAACAAGCTAGCATGTTTTCTTGCATGTATGCATTACTA
GTACAGATGTCTGCTGCTATTATTGGTACTTATGAAGAATATGAAGCATGAGCACGATTTTACTGCAGGC
TGCTTTGAAAGCAGCAGAACAAACTAGTAAACCTGAAGAGGCCCTTCGGTTGGAAGCTGAGGTATCGACA
AATTTTATGTTGTATGTTTGTCCCTCTTCTTTTTAACCATTCTTGAAAGATTCATGACAAGGTGTTGTCA
GTATAATTCACATTTCCAAGATCATGATTTAGGTTGCTAAGGATGAGGCCGCATCTGCGATTGAGCAACT
CCGTGAAGTTCAGTCTGAAGCTAAGTCACTCCAAAATATGACACAGCGAATGATACTGACTCAGGAAGAG
ATGGTTTCTCTTCAACCTTGCTTCTTATCATCTCATTGTTTATTCTTCTGTACTCCTTTATGTCCTAGTA
ATGTGATTTGCAGTTTTCATCTTAGGAAGAAGTTGTTCTAAAGAGGTGCTGGCTTGCACGATATTGGATC
TTGTGTGTTAAACATGGTAAAACCATTTGAGCTTTTGGCCTTTTGCTATTCCCATGCTTTTGAATTTTTA
TCTAAATCTAAACTTCTGATTCTGCAGACTTTAAGTAAGAAACCTTTCTAAAACCAACTTGTGGATTGCA
ATTTTTTGCAGGTATTCTCGCAGAGATTGCTGGAGCAAGATATGAGTACTGGTCATCCTTTGCTCCTCTA
CCTGTTGAAGTTGTATTATCCGCTGGACAGAGAGCTAAAGATGAGAATTCATCTGGTGAGGATTTGTTCA
AATATATCTATATATTTGTTTCAAATGGTCAGTTTACTCAATAAATTCTGCTTGCTTCTTCTGGAGCAGT
AAATGATGACGCAGAAGAAAGAGAGAGAGTTCTAAAAGAAGGAAGTGAACTTTCTGGAGATGGAAATATT
GAGAGCATGCTTCTAGTTGAGAAAGGCCTGCGCGAACTGGCTTCACTAAAGGTTTCTGACGCACCCTTGG
AAGTTTCCTTGCTCATATTTTGTCGAATAGCAGTTGTTTTCTCTGTTGCTTTTGCTATAAGCTCTAGTCT
TAGCTAAGCAAAATCATGTTAAAATAATGAATGCATATGGTTCGATAATTGAAGTTATCACTCGTCAATT
TCCTATCAGGTTCTGTCATGCTTTATGTCAAAGTGATCATCCATATATCCAAAGGTTGTAAAATGACACT
AAAAGCAGCATTGCTTGATTTCTTATGGCCTCAAATACAACTTAATAACCAGTGGAACCCCTTTAGGCTT
TTGTTCATGAAATGTACAGCTCTTAATCAAAGATTGCTTTGGATAGTTAACTGTTACTGTCATTTGGGCA
TCAAGTATCATTTCATGAAAACAAGTTTGCTTTAATCCAGGTTATTTTGCACAATCTCCTGTTGCTCTAC
ATGGTTTCTAGTAGGAAAACATGTTTAAGAAAACATTTCTGAATTAATCAAGGAAATAATCTGGCTCATC
TCTAGACAAGTTGCTATTCAAAGTGCTGGTTTCTTAGCAGCTCTTGAATCTTCCTTTTCCTTTCTTTTCA
AGGTAGGGGAAGCAGTAGCTCTTGTCATGGCTCAGCAACGTCGGACGAATTTTATGAAATCAGGTATGAA
TTAATTATGGCTTGCAAATTGAATGATTTTCTGCATGAAAATCTATATTATTTTAGATTTTTTTTTCCTG
GTTTTTCGAGTTCTTGTTTTTTATATTTTAAGATTAATTTATATCTCATTGCTGATACATGACTCAATCT
GATTGCTTGATGTTCACTTGTTTTCTTTGATTTCTCATTATAATGGCCGAAGATGAAATTAAACTAGCCG
GCGATGGAAATCTTGAAGCATTTGGTAAGTCCATTGCTGAAAACATGATCATGAAAGAAGTTTTTCTCTT
ACAAAGGCTTGTAGTCTTGGCACTGCTATTGAGTAATATATTGTATTATACTGTTGTCTAAAATTAATCA
TAAGAATAAATTCTTTCAGAATTGAGCCAGGAGGAGTCCGAAGACGTGCGATTCAAGCAGGTATGATAGC
ATCTGCATACAAATTAGCATGTTTCAATTGTTAAAATATCAGAGAAAGTTAAGTTGGAGCAAAGTTAGTT
GACCTGAGCAATATTTTTTTTGGTTTTCTTGTTTTGCTGGACCAACATGTGATGTTCAGATCTCTGAAAT
GATGATAATAAGTGCGAGGGCTTAGTGCTTGGTAGCGTTTGGATAGACGGAGATAGTAGAGACAGAGAAG
ACATGTCTCTGTATACCTAAGGACAAATTTGCACCGAAACTATTTCAGATTTCTCTGTCTCTCCAACCAT
CCTTTTGTATTTGTCCCGTTTGTCATGAGATACTAACCGAATGCAATCTAATGATCTCGAGACAATCTAA
TAAACGATAATACTAACATAATTCTGCTGCCAAACATGTGAAATGAATGTAATCTCATCAAATTCATACT
TCCATTGTATGTTCTTTAGCCCTTCACCCTTCTGATTCGGTTTAGGGAAGAACTTGTGTTCATGAGTCCT
TTCTCAAATACTCATTCGGTATCCACACACAGGCCTGGCTTACATATTTCTGGAGAAGAGCCAAAAACCA
TGGTCTGGAACCCGACATAGCAGAAGAACGTTTGCAATTCTGGATCAATCACAGCAGTCGGTCTTCCTCG
TCACACGATGCAGTCGATGGTAATCTCCCTCCCTCTCTCCTTATCCGACACACACAGGCACGCACACACG
CACATGTTAAACACAATCATCTTCCTTCTCCACATCAAGTAGTCTGCTAGTTTCAATCCTGAACACGAAT
GTGTGCATTCTCATTCCCGCAATCTTTCTTTTAATTTACTTGGTTATGATTCACTCCAATGCGCAGTTGA
GCGCGGACTCATGGAGCTCAGGAAATTAGGCATTGAGAACCAGCTATGGCAAGCATCTCGAAGAGGGCTC
GAGGTTGACTCCAACTCCAAGGCCAATCTTGAGTCCGACTTCTGATGTAACGTTGAAGCTGTTGTCTGAC
ACAATAATCATTGCAATTGGGAAATCTCCTCTACATGTTCATATCAGCTAGCTGATAATTTTCTTTAATG
CTTCATATTGGGAGCTATTCATCTCCAACTACCTTATTCTTGGCTCCATACTTCCACTCATGTAAATTTT
CTATGGCAACGAGACATAACTGTAACCAAATATATTTAATTTGATACGCACAACGTATTCTATGGCAGCC
ACACAAATTCAATTGCCCTGAACAAATTTTGTCATAATTCAAAATGCAACCATGAACTGGGAGGCTTGGA
CCTGTGGTTAAACAGAATGCATTCTTTTTAGGGTTCATGACTCAAATCAAGTCAAAATGTGTAAAATTCT
TAAAAACAATGTTTTTTTTTAATTTTTTAAATTATTTTGACCATCAACATATAAAAATATTTTAAAAATA
TAAAAAAATAATTTTAAACAAAAAAAATTCAAATTTTAATGGAACGTGGTTCGAATCGCATTCCCAAACA
TATGAACGGATCTCATTACAAAAAAACTATATTATATGGTGGTAATTTGTACAAGACTAATTAGTATGCT
AATGTTATTAAATTTGATTAGATTAATGATTCAATTTAAAACTCGAGTAATAGATTAAAAAGCTTAATCA
AGGATAATTTAAAATAATATCATTTTAAAATAAAAAAATTTAAAATAACAAAAAAATCTAAATTAAATTT
TAATCGATCAATCAAGTTTGACTATAAATTTCACCTTATCTAATTTAAAATCCAGGCATGACTAAAGAGG
GTATTGAATTGACTTGCCGGGTTTAGAGTATGTTTGAAAGTGTGATTGCAATTGTTTTTTAATGCAAATG
CATCAAAATAATATTTTTTTTATTTTTAAAAATTATTTTTGACATCATCATATCAAAATAATTTTAAAAT
AAAAAAATATATTAATTTGAAATAAAAAAAAATAAAAAAATTTTAATTTTTTTTTAAAACATAAAACAAC
AATAAGCTTAATATCATTGCATAAAGCTCGTGCATGAGCTGGGTCATCGAAATCGACAGCCACTAGATAT
GGTAAATGATAGTCGGGCCACCTTATCCTTGTTTTCGATAAGATATTCATGCAAAAATCATTCTGCAACC
GATATATATATATATATATATATATATATATATATATATATAATAATAATAAGAATTAACAGAGAAAAAA
CATAGATAATGGAGAGACATGTTCAAGATGATGTCCAATGGACCGACTAAAACCCAGTAGGCCCATCACA
TCCCAGGTGTCACCTTACTGTAAATAAATCCATTAATTTTACTGTCAGCAATGCATTCATTTTCACCACA
CTTGAAAATGACCTAGAGGGGGCCGTTGGGGTAAAAACTAAAAGAAAGGAAGTCTTACCAGACTCTCATT
TGTCCAGTAATGAACCACTCCCTTCTATAAAAAAGGTAAAAAACACCTATCTCTTCACTCTTCTTCACTC
TCAAACTCAACAAACAAACATACTGTCTCTCCCTCTCTCTCTAAGGGGTGCTCTGAGGTAAAGCTTCAAC
CTTTCCACTCTCTTCTTTGATCACATTCAAGGGTCTTAGTTATCATCTCGTGATCATTTGATCTTTGATC
AGAATCTTGTGTTTTTTTTTTGGCTTTGTTATGCTTTGACTTTTTAAAGATCAGCCTTTTATGATTTGTT
TGGTGTGATTAACTAGTAGTAGCTTGATGATCATACTAGTGTTATCTCGTTTTCTTATCATATATGCTCT
CTTTATTCACAAAGTGTTGAGTCGGTACTTGGATTTGGTGTTTTTTGTTGTTACTGCTTGTGGGTTTTGT
GTTTTTTTTTTCACAGATCTCTCTCAAGTTTTGTTCTTTTAATAATATATAAAATTATCTGTACCTTGTT
TGGGTTTTGTAGATAGAATAGACAAAAGGGCAGGAGAGAAAAATAAAGTTTTTTAAATTAGGAATTGGGT
CGATAAATGGGTATTTTGTATAAATTAGAACTACTTAATGATACTGAAGATGTGCTAATTTGTTTTGGAA
TCATCAACTTTGCGTACTTGTAGCTTTGTTTTGAGTAGCTTTGTGGGTTCTTTAGCTTCGATTAGAGTGA
TTTAGTAGGTATGATTGATGTGTACTCTTGCGCATAGAAGTTTAAATTTTAATTTGGCTGTTTTGAGCTG
CGAATCTTTTGGTGGGCGTTCATGTGCAATGTGCCTTTTATTTTTTTGTTCCCTTGTTGTATTCGGTCAG
GATGTGGTGTTTGTGTGGTTTTTTTTAAAGAATTTAGGTGATTGTAGATGTGCAGTCCTAACTCTTGTCT
CTTTTAGATCACATAGAACA
Sequence ID: 106
Sequence Length: 4006
Sequence Type: DNA
Organism: Poplar sp.
TGTCATTATCAGCTCCATAAATAACAAATTACTTGAGGTGTCTATCATATGATATGATGATTAAACAAAG
AAACAAGTAAAAAAAATGGTAGATTCTCACCTAATCATTTAATATCTTGGGATAAATTTCAGTGAACTGT
TTTCCCTTGTAGTTTTTATTTTATAATAATATTGTTACTAAGGTCGTTTTTGACACCGTGATACAGCCAA
TAATTATTGACTAGCTAGCAAAGAAGAGGACTTGGTATGTTATATATTTTTATTGTGTTTTTCTACAACT
AATCAGAAGAAATCAATTACTAATTTGACAATAAAAGCATGCAACCAAAAACGAAGTTTGAAAATTAAAA
AAATAAAATTATGTGGATTCGTGTTCCTTTTCCCCAAATGTTGCAAATGTGTTTTTTTGGTATAACAAAA
TCAGATACATACTAGATAATATATTTTTAAGATATTAAGATGGTGATATATTTGATGACATGTAAATATT
TTTTATATATATTAAAGCTTTGACATATTAGATTGATTCAGAAAAATTTGGATTAATCAGAAAATTCATG
ACCCTGATCATGAGACAGTGACGGAGCTAAGGGGAGGCAAGCAGGAATCCGGGCCCTGAAAAACATTTTA
GATTTTTTTATTATTTAGTATTTAAATATAACAAGTAATATTTTTTTATTTTAAATAGATGGGCTTTCTA
ATAATAAATTATTATTTCAATAGTTATCTTTGACTTTAAAATTATCTCTCCGTGAAAATGAAAAAAAAAG
AGAGAAATAATGTTTCTTTACCGTACCGTCTCTCTCTTTTTTTTCTTTGGAGTCCTAACCAAAAAGTATA
ATAATACAAAGCGGAAAGGTTAAAGCGAAGCTGTCTATTAATTGTTCATCAAAACAAGGTAACTAGTGAC
TCAAATTTAATTTTTTTTTAATGTTTGTTGAGAATTTGATGAGGTTTTTTTTATATATATATAATTATGT
TATTTTTTTTTTTCCAGACCTACTAGTTTTACCATTTTTTTTTATTTCTTGTTATATTGAATGTCTTTTT
ATGAGTTTGTTTCAATTATGCTTTGATTTTTTATGTTTTGTTTTTAGCAAAGCCACCCAAATTATCAATT
TTTTCTTACGTGCATCTTACTATTACCAGGTCCAATATACAATTAGACACGATCTTTCTAGCCAAATTGA
GTTCTTTGAAGAGTACATACCTGGCTTTGAAAAGCACATACCCAGATGAAATTAACTTTATAACTTTGAC
TTAATTGGGTATTGTTTTAAACCTCTTACTTTATACAAAGATCATCACATGTTTGTGGTAAGTTCTTTGA
ATAAAACTAAATCATGCAGGGGTTTTTTTACAATTCATGTACAGTAAATTAAAAAAATTATATCTTGTTA
TATTAGTTTTGACCCCCTGTTAAATAATCCAAGCTTCACCCTTGCATGACACCGTGATAACATCATATAT
ATAGAAAGCAAATCAAATCAAAACAAAATTAGAAAGCCCAATTCCAAACAGCAAGATGATGAAATGCGAA
AGTAAAAAAAAAAAAAGTATATTCAATTTTAGAAAAGGATCCAAAAAAGCAACTCGAGTAAAGTTAGGTA
AATATGTCAAACCAACAACCCGAGTCATGAGAACAAAATTACTTCATAGAAAACAAATAAAAAAATAATA
AGGCTACTTCTTAATCAATCTAACGTTAAAGAAAGCAATTGAAAAAAAAAATTGTTTTAAAAAAAAAAAA
AAACAACCCGAGTCAACATTTCGAATCCACAACTAAAGTCATGAAACCGAGATAACTATATAAAAATAAA
ATTGAGAAAATTACATTTTTTTAAGTTAAAAGATAAAAAAAATTCACATAATCCAAAAATAATAATTTTA
TTTGTGTATGATTTTTTAAAAAAATAAACTGGTTGATTTTATTTAAGTTAAGGTTTTTTTTTTTAAAAAA
AAGAAGGAACGCCTTTTTAAAAGGAGCACATGAGTTTAAGCTTGATGGACTAGCTCTTTTACCCAAAATC
AAAGGCATGTTCCTCTAGGCCAGCCCGTTAACTTATTTTTTTTTTACTTGGTTGGATGAATAATACGTTG
TATGCTTGTCTTTTTTTTATTAAAAAAAATAACAAATAATGCATCATTTAATTTGACAAATAATATGTCA
CCTTTAGTTCCACCACCAACAACATTAGGTGGCTGAAAAGTCGAGCTAATGATAAATTTTTCTGGAAAAA
AAATTCTTTTTAAATATTTATTTACTGAAAAACACATTAAAATAAACTCATTTATAGGCTCAAATTAGCA
AAAAATGAGTTTAAAAACCAAGAATTAACCCCAGTTCAAAAACACTTCTCGATCCCATATCTATTATTAG
TCAAGATGAAGGCTAAATGACACTTCATTAAAAAGAGCATGTTGCACTAAAATCAATTATTTTCGCGGTT
AAAATCTATATCAACCGATATTTTTTCTTTTCTCAATTAGAATCCAGCAACATTATCTCTCCTATTTTAA
TCTTGAAAGCTAAAAAGTAAAACAAAAAAAAAAACAAAGATTTAGATCAAAAGTTAACTTTCAAGAAATA
AAGGGATTGAAAATGTTTTTATTGAAAAGTATAGAGACTAAAATGAACTTTCATGACATTTTTTAAAGAG
CAATTTTTTTTCATTTTGGTCCCTTTTGTTTAAATGTCATCCTTCCATAACAAATTAGAAACAATTGGCC
ACTACTTTTATAATTGAAGGACAAAATTAAAAAAAAAAGTTTGATAACCAAAAATGAAATAAAAATGCAA
AAATTTCACTACTCCAATCCCCATAGTAAATTGTGTGAGGGAGCACAATAAATTTTGCTATAATAAAATG
ACCACACCTCTTAATTTTTTGCTAATATAATATAATGTTATATAGAAATCCTAAAATAAAATTTTCAAAG
TGTGATAAAAAAACTAATTGGTTTGAAGATAACATCAAAACTCATAAAAAAAAAATGATTGTCTCGCCAG
ACTCTGATTTGTCTAGTAATGAATCACATTTTTTTATAGAAGCGGCCAGAAACATCTATCCACTCACTCT
TCACTCTCTAACACGACAAACAAGCATACTCTCTCTTTCTCTCTCTACTCTCGAAGGGGCGCTCTGAGGT
AAAGCTTCAATCTTTCCATTTTCTCCTTTACTTTTTCTTTTGATCAAAATCGAGGGTCTTAGTTATTTTC
TCATGATCGTTTGATCTTGATAAGAATCTTTTTTGTTTTTTTTTTTAGTTTTATTATGCTTTGACTTCTT
AAAGATTAGCCTTTTATGATTTGTCTGATGTGATAAAATCATATGGCTATTACGAAGTTGTTGGCTATTA
TGTGTTCTTTTTATTCTTAAAGTGTCAAGTCTATACTCAGATTTGGTTTTTTTGGTTGTTTCTGCTTGTG
GGTTGTGTGATCTTTTCACAGATCTTTCTTGGGTTTTGTTTTTTAATCAAGGCAAGCTACCCAGGTATTG
TTAGACCTCAATTTTAGTGTTTTCTTTAAGACATAACATTTACTTGATCTTGTTTAGAACTTGTAGATAG
AATAGTCAAAGGGCACGAGAGAAAATAAAGCTGCGTAAATTAGGAGCCGGATCGAAAAATGGGTATTTTG
TGTAAATTAGAGATGCTTAATGATACTGAAACTACACTGATTTCTTATGGGATCCTCAAATATGTGCATT
TATAGATTTATTTGATTAGCTTTGTGGGTCCTATATCTTTAATTAGTGAGATTTATTTGTTATAATTTAT
ATGTGCTTCTGCACTTATCTGAATTTTAGATTTTAAATTGGCTGTTTTGAGCGTAGTCCTTTCTGTGTGT
CTGTGGGTGCAATGTGCCTTTTGTTTTTTCTTTCTCTTGTTATATTTGGTCAGGTGCTATTCTTGCGAGA
TGCAGAGTTTGTGTTGATGTTTTTAAGAATTTAGGTTATTGTAGATGTCCAGTTTTAACACTTACTCTTT
TAGATCACATAGAACA
Sequence ID: 107
Sequence Length: 3000
Sequence Type: DNA
Organism: Poplar sp.
ATAATATTTTACCTAATTTTATTGCACGCTCAAAAAATCATGAAAACTATAGTTCTTGTCGAATGAATTT
TGTATGTAATGAAATTGTAATTTTTTTTAAAAAAAATTGAGTTTTACTCGAAAAACTAGTATTTAATATT
ATTTATAACACTACTTAAATTAGAAGGATATCGCATGATGACGTAGCATTTGTGAAATTTGATCGTCATT
CCAATTATATTCTTGCCGGGTCCAACCCAGTTAAAAAAATTCAGTTTTTATTTTTATTTTCATTGTGTTT
TATTCAAAAAATTAGAAGGATATCGTTTGATGACGTAACAAAAAATTCAGTTTTTGTTGTTGCATGCTTA
AGAAACCATGAAAAATATAGTCATTGTTTGATAGATTTTGTATGTGATGACATTGCATATAGTTTAATGG
AATAATAAAAAATATTTGATATCAATATTATTTATTTCATGATGTAATAATAGTAGTTAAATCTTCAATA
TTTAAATTAAAAATATTTTTTAATTATTTTATAACCTCAATTTGAAAAGCATTTTTTTAACCAAACACAT
TAAACTACTTTTAGTTCAACCTCAATTTCAACCACAATTTTAACCAAGCACCTATTTTTTCAAACCAACC
TTAACTAAAAATACTTTTTATAAAACAATTTTTTTCAAACCACAATCACAATAGCAACCGTAATACCAAA
CATACTCCGATGAGTGGTAGCGATTCCATTAAGTTGTCACGTGTATCATGGTTCTCGACGGCCTGGTGGT
GCTTGGGTTTTTTCTTCCCCCCTCATTCTCTTTTTATGGCATTCAGGTGTGCTTTGACCAAGCAAAAAAA
AAACGTCCTCTTGTTTTATTTTTATTTTAGTCATACTTCTCATTCTTTTGATTAGTCCTTTATCGTTTTA
ATTTTTTATTATTATTATTTTATTTATTTAAATTAATTTTATTTGGTTTTTTTATTGGATTTGACTTTCA
TTTTTTTAGTTGTTATTTTTTTCTTTTCAATTTCAACCCTTGAGATTTAATTTGATTTGTTTTTTGCATT
ATATTTGATTATTATTATTTTAATAGTTATTTATTTTTGAATTTCATCTCTTGAGATTTTATTTTTATAC
CAGATTTAGTCATCGTTATTTTAACTATTTTTTTTTATATAGTTTTTCTAATTAACTTTTGTTTTTTCAT
TTTATTCCTCAATATTTTTTATTTCTAATTTTGTTCTCATTCCTTTAACATTTTTTTTTCATTTTTTTTA
ACTATTTTTTTTTAATTTTCATTCATCAATATCTCACTGATTTGTAGTCTGGATCGTAATATTTTTTTTA
ATATAGAGATCTCGGTCTCATGCCCAAGGGACAAGTGTAAGATATTAACCCGGGTCGATATTGGTTTTTT
ATTACCCTTTTGTTTTAAACTATTTTTTTTCTCAAATCCACTCTTCAACATTGCATTTATTGAGGATTTG
GTTCTTTTATTTTTCTTATTTTGCTTTTTGTGAAGATAGTTCGACCTCATGATCTAAATCACAAGTTTAT
TGTGTTGGTTCAGATTGGTTCGAGCAATATGCTTGAGTCTCATTTTATAGTCCATTCATATATTTCATGA
TGAGAATCTAATTAGAATATTATTTGAGCTATTTTTATTTTAAAAAACTTATTTAATTCAAGATTTTTTT
ACCCTGATTTTTAAAATTAACCAAACATTTCATCATTTGTTTGTTTTTTATATATTTTTTTACATTAGAC
AATAAATCCTCCTTCTTTTTTTGTTGTACTTTAAAAAAAATTAAACTTTTTTATTTTCCAAGGTCGCACA
CCGCCTCTATTTTTTGTCTTTTAAATAAGCAAATTGTTATTTGGTATGAAAATATCTCATGCATTTGGTT
TGCATGTGTTTACATGAAAAATGGTTTTTTATATAAAAAATTGTTATATCTAGTAGGATTATGAATTCAG
ATTGGTGGTATAGCTGGTTAACTTATTTTTTTTTAGATTGATTTTGTTTTTATTTCTAGTTTTTATATTC
TTTTTTCTAGTATTTGATGGGAGAAAAAAGCAGTATAAACCTGCACAATCATTTTTTTAAATAAAAAATT
TGCTATAAAAAACGTGTGGAATAAGCCATCACATTTTTTTTAAAAAAAAAGATAATATAACTAGTACAGT
ATAAGTTCAACTTTAACGTTGCAAGTATCGGTCTACGTATCCCCTACATTATACAAATCAAACACAGTGC
ACTCGCAACAACTATAGTTGTCTGTAAAAAAAAACCTTTATAAAGAATTTACAGGTTATTAGAAAATTTC
AAGATTTTGTAGAAATAAAATAATTTCAATATTTTTTTTTTAAATTTTAATACTTGAAAAAACACGAATG
AATGATACAAATAATTAAAATTATAAATTTTAATAAATTTGCAAATCATATTCAGAGCGGCACATTAAAA
ATTAATCTTAGTAACATTATCATCTCTCCATCTCCCTCGTATAATTGATTGGAAGATTTTTTCTTATAGA
ATGAAAATAATCTAAGTAAATGATAATTTTTTAATAATTTAAATAAAATAAATTTTAAAACTATTTTTAA
AAAATTCAACTAACAAACCAAACCAATTCAAGACACCTCAATCACGATTCCTATCATGTTAACATAATGA
GTGGTCCAAAAATTGTTAGATGGCCCAATCCCTGAAATACACCGTCCTATCCCTCAGCTAACCATGACGT
ATTAATCCATGGGCCTATAAGAGCATCACAAAACTGCCAAGCTGTTTCGTTAATCCTAACATCCTTTTCA
CTTCAATTTCCAAAACCACCCTTATCAAATCCATCTCCTCCAAGCATATTCGAAACAGATTCGAGGCTAA
AACAGTAAATAAAATAACCACAGATTTATGGATCCATCACCATAAGAACTCCACAAATATCAAACAAAAA
CCCGAAACTGAAAACAAAAACAAAAACTAAAAATCAAAACCCGTCACTCCACAATCTACA
Sequence ID: 108
Sequence Length: 3047
Sequence Type: DNA
Organism: Poplar sp.
CTAACTTTCTCGACTTGTCGTTTTGTAATGACAGATAGAGAGGAGGTATAATTTTTCTTTTAGATTTTTT
TTTATTTTTAATATCAGCATGTAAAAATTATAAAAAAAATATATTCTTTTAAGCAAAAAAATTAATTTAA
AAATTGAATTAAGAGATTGACAATTGAAACGTTGGTGGGCAGTGGGCAGTGGGCAGTGGGCACTAGCACT
CCGTTATATATACACATATTGATAAATAGATAGATGAGAGGTAATTTTAAGGGGTGTAATTTAACTGTTT
AAATTTTAAATTTGTTTTTTAGAAATTATTAGTTCGAGTTTTATAGATTTCAGAGCTATTTGAGGCTTAC
ATGGTCATTAACTTCAGAATCCATGAGATTAATTAAAATACACGAATATTGACTTGAATATTCATATTAA
TAATAAAAAAAAAACACTAGAGTTTGCCGAGAAAATATTGCTAGAATCTCTGCATGTGTGACCACAGACA
GTGAGCCAGGCCTGAAAAAATCATTAAACCATCCCATACCGTCGTCCACGCCACCTATATAACAATCTTC
AAGAATTTGGTACCATAGAAACCTAACACAGCAAACAAGTTTGCGAGACAGTGAAGATTGACTCTTGGGT
AGAACTTAGAATCTTGTCTAGAAAATGAGCTGGTGGTGGGCAGGAGCTATTGGAGCTGCCAAGGTAATTA
AGATTAAACCAACCCCATCTACAAATCTTCAGCACTTTAATATTTGAACTTGATATTTATGTTTTAACTT
AACATTAATTTCATCTGTTGGCAAATGTTTTGCAGAAGCAATCTGAAAATGGAGACGCATCACGAGGACA
CCAGAGCGTGGCTTTAGTGGTAGGAGTAACTGGCATTGTTGGCAACAGCTTGGCTGAAATCCTACCACTC
TCCGACACGCCTGGTGGTCCGTGGAAAGTCTACGGAGTGGCTCGTCGTCCACGGCCAAACTGGAACCTAG
ACCACCCAGTTGAATACATCCAATGTGACATCTCTAACACGGCCGACACTCAAGCAAAACTCGCCCAGCT
AACTGATGTTACTCACATCTTTTATGTCACATGGGCCCTCCGATTCACGGAGGCCGAGAACATCGAAGCT
AATAACCTCATGTTCCGCAATGTCCTTCAGGCTGTTATCCCCAACGCCCCCAATCTCAAACATGTTTGCC
TCCAAACTGGTCTTAAACACTATGTTGGTCCATTCGAGTTGGTAGGTAAGATCGAACCACATGACACTCC
TTACACAGAAGATCTGCCCAGATTAAAGGCACCCAACTTTTACTACGATTTAGAAGATATTTTAGCTGAG
GAAGTGGCAACGAAAGAGGGAGTGACTTGGTCTGTGCACAGGCCGCATACAATTTTCGGGTTTTCTCCAT
ATAGTTTGATGAACATGATGGGCACTCTCTCTGTTTACGCAGCTATATGTAAACATGAAGGGATGCCTTT
ACTATTCCCCGGGACTGAATCTGTTTGGAATGCTTATTCCATCGCCTCTGATGCAGATCTGATTGCTGAG
CAGGAAATTTGGGCAGCTGTGGATCCTAATGCACAAAATGAAGCGTTTAACATCCACAATGGAGATGTTT
TTAAGTGGAAGCATTTGTGGAAGGTTTTGGCTGAACAGTTTGGGATAGAAAAATATGGGTTGCCTGAGAG
TGGGAAGACAGTGAGCTTGACGGAGTTGATGAAGGATAAAGGAGCAGTGTGGGACAAAATTGTGAAGGAC
AATCAGCTGTTGCCTAACAAGTTGGAGGAGGTCGGGGTGTGGTGGTTTGCCGATTTTGTGTTGGGTGCAG
AGTCCATTATTTCGTGTATGAATAAGAGCAAGGAGCATGGGTTTCTAGGGTTTAGAAATTCCAAGAATTC
CTTGATTTCGTGGGTGGATAAGTTGAAGGCTCACAAGATCGTGCCTTGAGTTTGGTGGATTTAGGTTTGC
TGGTCTTTTTGCTGCTGTCATGTTGTTTTAAAAAATAATTTGGAGGATTGGAGGATTTTCTTATTGTTGA
TGATTTCTATTAAAGCATATCTGAATTCTGAAGAAAAAATATTTGCTGGAGGTCTATTTCTCTTTGTTCT
TAATTTTATTAGAAAAAACTCCGACTGGGCTGGAATTAATATTAGTTAACAACTTGTCTTGGCTGCCTCC
CTTCGAGGTCAGGGTCCAGAGCCCACAAGACAGGTAACTTAAACTTACAACTCTTCCTACAATACAATGC
GAGTCGAATTAAAAAAAAAAGAATAAAAAAGCATGTATCAAGAAATATAATTATTTGATATTTTCTATTT
TAAATTAAATTATGTAAAAATTATTTTAATATGACTCAATCAACCATAGCTAAATTGTTCCCCCTAGTTA
ACCAAAAAAGTCTGAAGATATGTTAAATCAAATAAAAAATTGAGACAAAAACTCGATTAATTATACCAAT
TTTGTATGCCATGGGTTACTAAGTGCATGCAACAAAACCCACTGAGTCATAAAATGCACAAGTTGATGGT
GTTGTTGGTGCAGTCATCAGGGACTAACTTGATACCAATTCGATAGATGGAGGGTGTATTTGTAGATTAC
AATTTTTTGTTTGCCTGATTTTGTATTATGGAAAGGTAGAAAATTGGTATTTTTGCTTCTAATCATCCGA
GTCAGCAGAGTGTCGTGCACAAGTTGTCGAATGAAAGTTTGGTTGATATGATATAGAAAACAAAAGGAAA
AAAATTACAATCAAAGGGATTTTTTTAACAGTAAAAACTCATTTCCTTTAGTTTTTTTTTTTTAATTTAA
CAAGCTCAATCAAATTACATACTAATCCTCTAAATTAATGTTAAATTTAATTAAAATTAAAAATCGAATC
ACGTTTCTTATCATTACTTTTGTCGGATAATCCCGACAGGCAAGCTTTACTAGAAAACTCTATCTAGTTG
TCACGTATGTCATGGCTCGCGTCACATAGCTCTTGTTTTCACGCGAGAACCAATTTTAATAGGGCGATTC
TGAATCAAAACATATCCAGAAGCAGCAGCAAGTTAAC
Sequence ID: 109
Sequence Length: 3127
Sequence Type: DNA
Organism: Poplar sp.
CGTGGACATGTGCCAAACACAAAAGACCACTCCACAAAAAAAGTGGATTAGTGTGTAATTCATAAATAAA
TATCTTGGAAATGCAATCATCGGCAACACTAAACCGACAATCTGTCCACTCAAGTAACGCATCCACGACG
TCAAAGAGCGATTTATCACCTTAAACTATTGCCTCTCACCACACATGAACCGTACCACAAACCTGCTAGT
CGCAAATCTCGAGATACCCTTCCCTTTCTCAGTTTCTTGCCGACGAAACCGCCCTGAGGTCCCACCCAAC
TCGGGGTACTTTTTCCGATGACGAGGAACGACGCCCAGACCCTTCGTACGGTTAAATCCTGAATACTTAC
ATAGGATTCTTATAATTACTGTTTAAAAAATGGATTACGCTCCGTGGTTGGCGGTTTGTCTTCAGATTTG
TGCAGTTAAATTTTTTAAATTAATATTTTTTATTTTTTTCATTTAAAACTAAAAAATATATATTATTTTA
ATATATTTTTTTAAAAAAATACTATGAAAAATACTTTATACCATGATTTTAACCACCTCCAGACTATATA
TATGAAAATACTTGATTAATTAATACACATTTTAATTTTATATTGATTTTACTAGAAAATATTTTTTAAA
ATTTTAATTAAAAAAATATAATTTATAAATTTATTTTTAAAAATTATAATTATAAAAAAATACCACGGTA
TCAACTAAGGCAGGTAATCCAAAAAAGGCAAGGCTACAAAAAAGTCGGATTTTATAGGTCAAGATAGATT
TTTATACCCTAACCCTGCCAATTAACTAGTTTGTAAGTGATTCTGCTGGTCACTGAGGTAGAAATGCTAC
CGAATAAGAGGCCCAGTGCACATGACCCCTCTGAAAGTTTAAAATGATGACCAAAATTTAATAGTTATTT
TATATAAATTTTATTTTTTATAAAAAGTCCTTTTTAGTAAAAAAAATAGTATATTTTAGTTAAAAATCTA
TAATTATTGTATATATATATTTTTTATGTGTAAATGATTTTTGTATCTTAATATACCCCCCTGCTTCTAT
AACCTTGAATTCCCAGTTCCTCCCGTGTAGATCTTTCAAATCATGAATACTAGATATCTATACAAATTGA
TATGTTAATTTAATTAATTTTATAAAATCCAAGCCCGCCATTCTTTACTTCTTCTACTAATTTGTTTATA
AAATATATGTTTCAATATCTCTTGATAACTCAGTAATCCAATAATTAATCTAATTAGTAAGTTAATAGTT
CTAGACCAAAATGAATTAAACGAATAGATAATTTTGTGTGATAAGAATATATTTTCCCATAAATCTTCTA
ATCTTAATATAAATAATCCGTTTCTAAAATTAAATTTAGTAGCCATTCCATGTATATTACTAGAGAAAAC
AATAAAATATCTGAGGTTGCTTTGCTGCTTATTTGAACAACGAACACCTCTCCTGTTTATTTCTTTCACT
CTTGCCTTTTTTTTAATCTCACCCTCTCGTATTTTTTTTATTTGATCATTTTCACAATAAATTGATTTGC
TTTTCAGTTTTATAATTTGTTTTACTTTACTTTACATGGAGCTCTTGACATGTTGAAAAAAACTTTTAAT
GCTCGGTTGATAATCAACTAGACACATTTAAAATAAATGAATCTTTATAAGGCAAATTTGAATCTAAAAT
AAATGTTCAATCATTTTTTTTTTGAAACCAGTGACTAGATTTAACGAACTTGAAAAAAAAATTAATCATA
TGTAGCACATGCACCAATAACTTAGAAATGACATAATATTGTGACGACAATTGCAACGACTACCAAGCTC
GAGATGCGCCCTTACATGGTGCCAACAAAATCATCACGGTGAGGAGTTTATTATCTAATGGCTCATTGAG
ACAAGGGCTCTCCGGTGTTTTTTCTTTTTTCTTTTTTTTTCCTCTCTTGTTGAGTTTTGCGTTTAACTCT
GTTGTTTTTTATATATATATATATATATATGTTAAATTTGATTTTTATTCATTTGATTGTTATTTTTAAC
AATCAAATGAATAAAAATCATGTAAGGGCGCATCTTAGTTTGATAGTTTCATTGTTTTTTTTTTTTAATT
TGATCCTCTTATATTAGCCTAATCTAGAAGTAGGTTTGATAGTTTATTCTAGTTGACTTTAAATTGGGTT
ATTGCAATATCAATTATAAATTTTAACATTGAATTAATACTAACTAACAAAATAAAATTGAACTTTTATT
GATTCAAAACCATTAAAAGTTTAAAATTTTAATTTTAAAATGAAACAAATATTCAATATTTGTTTTCAAG
AAATAACATCTTTTCCTCAGCTTTTCAACTGGATATTTAATTAAAACAAATAGATTTATTATCATTTGTT
AATATATAATTATTGGTTTATTTTATTAAACCCAAATATAAACTTTTTAACTTGCATTATAATTTTTCTC
AATAATAATAATAAAAACGTTTACAGCACCTATATTTTATTTACGTTGAGAAAAAAAAAATCCCACCCCA
CACTCAACACACACAAAAAAAATCTGCTGTGGCCCCGAGATACACCGCCCCCACTTTCATATTTATCCAA
TCGAGGCCGACACCACGGGTCTCACTCAAGGACAGCCATTCACGTTCTCGTTCCACGTGTCGCCAAGGCA
TTTGCAGAACATTACAGCGTACCCCTCTCAACTTTTCTACTTCCTTCCCTCCTTTCAGACTGCTACTTTA
CACATTCCTCCGCGTATTGAACACGCTTATGCCTCCACCACTCCCATGAGTTCCATCTCTAATTACTAGA
CATCTAGCCAATCATTCAAGCGAGTACATATAATTCTATACATGTCGGAAGTAATACGTTTTGATTTCCT
CCCTTACTTAAATTTACACGTCGGTTACAGAAGTGAAACCTGACTGGCCCAGCTCACTTGGCTTTATTAC
TTCTTAATCGCGTCAGCTCCGCGTTGGCTTCCAGCTATAAAAGCCCATCACCCTTGCTAACCCAAACCCA
AACCCAAACCATCAGTTACAAGCGCAAATCACTCGAAGCAGAAGCTTACTCATTTTAATTACTCTGTTGT
GATTTTGATCTTTTCTTCATTAGGTTCATATTGTGATTTTGATCAGT
Sequence ID: 110
Sequence Length: 3067
Sequence Type: DNA
Organism: Poplar sp.
CTAGTATAGATTTAACCCGTGAAAATTTCAATTTATAACATGAGTTCATGAAAATATTATAAATTTTAAA
TCAAAATCCAAATTTAAATTAATGAAATATTAAAGACCTTAAATGAAAAAAAATATATTAAATAAAAAAA
ATAACTCTAGCAAATCTAGAAAGGTGTCTTGCTTCAACCATTAAAGTAGGAAGAAAAATTCAAAACTTGG
GTAATTAGCTTGAATGGATCCATTAAGTCGAGTTAATTTAATAATATAATTAAAAAATAACAATAAATAA
TAAATAAAAAGACCCAAGATAACCCATATTATTTTCAAAATGAGTGAAATTATATAGAAAAAAAAAAAAC
AAGCCTAATCTTCAAATAAATCAAATGTTGACGGATAAAACCTAAAAACCATGAGCTTAAAAAAAAAATG
ACTTAATACCTTATACTACGTTGCGAGTTAAATATTTTTTTTTCTAAACTTAAAAAATGTTAAAATGAAT
GAAGATAGTGACATACTAGATATATTTTTAAAAATGCATATTGAGCAATTACTTTAATTTAATTCAAAAA
AATTCTTCTAGAACAATCTAAATATAATAAAGAAAAAAAAATAAAAAGACTTTAGATAACCCAAATTATT
TCTAAAAGCAATGAAAAACTTTGTACAAAGAAAAAAAAATTGTATAGCCCAATGTTCAATTAAATTAATT
GCTAAATGATGAAATTAGAAAACATGAGAATTTGTTTTTAAAAAAACAACAACAAATAAACCCGAATGAT
TCTCCTAAACCCAGGCTAATCAAATTACCAATCACCCCTAGGACCACCAATAATTACAAAAAAAACCAAT
ATGAAAATACCAACATGCCCCTAAAGCAAAGCCTGTGACTTTTTTAATTCTAAGAGCAATAAAGTAGTTA
CTTGAACGGTTGATGTGAAATGTTGTAAGAGCAGTATGGAAACCAAGGAAGAAAGGGAAAAAAAAAGCCA
ATCGCAACCAAACTTTTAAGAATTAAGTCACACGTGCCATATGGAGAGATAGCCCTTGCAATTGTGAATA
AGAAAACACTAAGGAAATTGATTTTTACTTGCCAAGAGCCACCACATACGCCTTTTGAAAATGACAAAGT
GACGCACTCGTTGGTGCTTTCCATGAACGCGCCAATAACTTTTTTTTTTATTTGTTTACCAATCAAATTA
CTAAATCATTCCTAGGACCATGTGATAATTACATAAAATAAATCAATATGAAAATGCCAACATGCCTCTA
AAGCAAAGCCTATGACTATTTAATAGCAACAAAGTAGTTACTTGAAGGATTGATGTGAAATGTTACAAGG
ACAGCATGGAAATCGAGGAAAAAAGGGAAAAAAATGACGAAGGAAACTGATTTTTACTTGCCGAGAGCCA
CCACATACGCCTTTTGAAAATGATGAAGTGACGCACTCGTTGGTGCTTTCCATGAACGCGCCAATAACTT
TTTTATTATTATTTGTTTACCAATCAAATTACTAAATCACTCCTAGGACCACGTGATAATTGCATAAAAA
AAAAATCAATATGAAAATGCCAACATGCCTCTAAAGCAAAGCCTATGACTATTTAATAGCAACAAAGTAG
TTACTTGAAGGATTGATGTGAAATGTTACAAGGGCAGCATGAAAATCGAGAAAAAAAGAGAAAAAAAAAA
TAGCGCCAAACCTAAAGCAAAGCATATGACTTTTTAATTTCAAGAGCAATAAAGTAGTTACTTGAAGGGT
TGATGTGAACTGTGGCAAGGGTGATATGGAAATCGAGGAAGAAAGGGAAAAATAAAATAAAAAAAAGTTA
GTAACTGCCAAACCTTCGAGAATTAAGTCACACGTGCTGCATGGAGAGGTAACCCTTGCCGTTGTGAATT
AGAAGACACTAAAAAAGCTGATGTGTACGTGTTGTGAGCCACCACACGCACCGTTTGAAAACGATAGAGT
GGCGTGCTCATTGGCGAATTCCATGAATGTGCCAACAACTTTTTATTATTATTATTATTTGTTTATTAAT
CAAATAATCTAATCACCCTTAAGACCACCCGATAATTACAAAAAACCAATATGAAAATACCAACATGCCC
CTCAAGCAAAGTCAATGACTTTTTAATTCCAAAAGCAATAGATTAGTTACACTATGCATGTCAAAATGAA
ATTCCAAAAAGCCCCTAAATCATAGTTATTTTTTTTTTGCTTTTAAAGATAATCAAGTAATTTAATTGTA
CAAAAATTTATAAAAATACTGAGATACCCTAAACAATTATAAAATAACAAACAAACCTAGCAAAAATATC
ATTTTACTCCTCAGGCATTCTTGAGTTTTTTTTTGAAAGGAAAAAACACTAATTACTCATACGAAATAGT
TTATTTTAATTTTTTTTTATGTGTTATACTTTTTTTTATTGCGGACAAAATTCGATTCTCTCTTTTTTGT
TTTTAACTATCCCTAAAAGCATTAAAATAATGTTATTTTATTAGAAGTGTGATTTTGATTGTTTTTCAAA
GTACTTTTCACTAAAGAATGCATCAAAATAATGTTTTTTTATTTTTTAAAAATTATTTTTGACATCGTCA
CATCAAAATGATCTGAAAATATATATAAAAAATTAATTTAAAACAAAAAAATAATAATTTTTTTAAAATT
TTTTTAAATTTTTTTAAAACATAAAAACAAATTTGTCCTAGTCTCAATCTAACCTTAGCCAAATTATAAT
CTAACCTTAGCCAAATTATCTATAGTAATGGTTTTTTTTTTGGGTAATGGTTCCTTATAGTAAAAACCAT
TTGAGTCAAACCTCCAAAATGACATAAATCACAACTAAGCCATACGTAAAAATAACCATCCTGGCTTGCA
TGAACACCACCACCTCTTAGGCTCTTGCCACCTCATACCACCTAAACTAAATCAAATACAAACCCCAAAA
CAGTAATTTCCCACTTCTCCTCCTCCCTTTATAAGCTCCCCACAAGACCGTCCTCTCTTTGCCAGCCACG
AAGCCACCACCACCCTCTGCGAAGTGCAAACCCATTCCTTGCCCCCCTCCCTCGAAC
Sequence ID: 111
Sequence Length: 3089
Sequence Type: DNA
Organism: Poplar sp.
ATATATGTGATGACTGAATCAGAAAGGGGTTTGAGTACTGATTTAGGATGTTCTACTGGAATGTAGGATA
AGCATACAAAGTGGGACCCGACTTCTCACGTGCAAGTATAACAGGAGTTCAAGGTAAGGGTTGCTCCCTT
ACTTCTTTAAATTGTTTAAATTCTTGTAATGCTAGTTATATGATAGACATTATGCGTATTTTTTACTACT
GTGTATCATGAGAAATATTGCTATGTGAACATTGCCTACGGGCAGTAAAAATATTGTTGCGTGAAAATTA
CCAACAAGTAGGAGAAATATTATTATTGTGGGAACATTACCAATGAGCAAGAAATCTTTTTACAATGTGA
ATGTTACCTACGGGCAGGGAAACAAATACCAATTCTATGTGAATGTTGCTTACAAGCAGGAGAAATAATA
TTATTATATGAATATGTCCACCTGGTGAATATGACTAAAGAAAGGAAAGATACGGTGAAATGAACATGAT
TTGAAATCTGAATTTTGGTCTAGACTTTGGGATTCAGAGTTTAGATAGGGGTCTATATTGTGTGTGTGTG
TGTAAATGACCGCCTATGAACTTGATTAGCCGACCTCGAATAGGGGCGGCTAATGATATTAACAAATATT
GTTAACATCGGCATGACCTTGAAGGAAATATAATGAATATTGAACTTGATTATCTATTTATATCATGAAT
AGTTAATGATACTGACAATTAATGTTTTTATCGGCAAACCCATAATAACTTGATTAACTTCCTAAGAAGG
AAAGTAAATGGTGTCAAGAGAACTTGGCATCGACATTTCCGGAAATATCTCCAAGTGATGGAGAGCAATT
GATTGACCATTCGGGTTGGAAATAGCTCAATGGTATCGATTGATTAAGTTGGTGCCGACATTGCTAAGGA
ATTGATTAGTCTATCACGGTAAGGGTGACTAATGACACTAATAGGAGTTATTAGTGTCGACAGCGACTGC
CTCAGAATTTGGGGCGGGTAAGAAAAATGATAAATTAGACAAAAGTTAATGTGTGATAATTGAAAAGAAA
ACTATAAGTAGGTTGTGGAAAAATAGGCGTTAGATGTAGTAAATGATCTTCTTTTGCGAATCAACTATGA
TTATGCCTTATCGAGTGAGTACATATATGCGTAGTTACACGTAGTGGTGACCCTCCATTATCTGGTTGTA
TTTTATTTATTTTATATAATTATTCTTTTATTTTGATGTTGCAGGTCTTTCTCATTTCCATTAGGAGTAG
TGTCTTAGGTGTCTAGTTCTTTTGTATGAATTAAAGAATTAACATTTCCAATCCTTTTGTATGACTTAGG
GTTAGCATCCTTATTTCTTCTGTGTGAACCTGAGATGAAATGGATGTTGTTGTATTTTCTTTACATAATT
ATATTATGGGAACGATGTCAGTGTTCCTTTATCTTAATCATAAAGACCTTTAGAATTTTATGCTTGTAAT
ATTAATGTTATTAATCAAATTTATTACTATTAGTTTGTGTTGTAAATTATATGTTCGAAATGAATCCCTG
GATTTGCAAAATATTATGATTAATAATAATTGTGGTCGCAATGCAATATGGATATATGTTGATTATGGAA
TGAACATGAGATATGTATAGGATGAGTTGTTGGTAACTTGGGACCTCCTAGTATAGGGAGACTCTACCGA
AATTTCAGTAAAAATTTTGTTACAGTGTAAAATAAATAAATAAAAAAACTCATATTTTTACGTACCAAAT
TGTACGAAATTAATTTTAAATGCTTACGAAATCGTCGGGTGTTACATTCAATTTCATTCTTCAATCCCAA
TTTGTGATATATTTTTTTTAATTTGATACTTGTTATTTTGATTTCTAATTTCTTTTCTTGACTATTTTGT
ACAATTTTTATTTTTTTTAATTTAATCTTCCAATTCAAAATTATGATATATTATTATTTTTCAATTTGAT
CCTTGTTTTTTTGAATTTTTTGTCTTTTTGTTTACAATTTCTAAGCTGATTTTTTCTTATTTTCTATTTT
TTTGGGTTTTGTTTCCTTATTTTTTATGATTTTATTCTATTGTGTTAGCTCTTTATATATATTTTTTTCA
ATTTCACTCCTACTTTTTTTTAATCTATAAATAATTTATCAAATTACAAATATTTTTCAATATCATTTCT
TATGATTTTTTTAATCTTTCAAGTTTAGTACCCATTCTTTTTAATTGCTATTTATTTTGTTTGAGATTGT
TTTTATTTTTTTTTCAAGTTTCATCATCCTTATATTTTTTTCTCTCAGACTTTATCCTCATTCTTTTTAT
CGTTGTTTTTTTTTGTTGCCTTTACAAGTTTTTATATTATTTTTTTTCAACAATTTCATCCTTTAAAATT
AAATCGATTAAGAGCTAAGCTTTGAGTTCATGATTTAACAAGTGGCAAGTTTTAGAGATTAGATCAGGTT
TAGGAGGTTCGTCTGGATTTGCTTGTTTTTTTTTTAAGCTTATTCTTTTTTTATTTTTTGAGTTTTGCTT
TGATTTTTTTTCTATAGTTTATCTTTTATTAGGTTAGTATTGTGTTATTTTATAATCTCACGTATGGTTT
TTTTTTTTTGTTAATTTATTTATTTTTGCTATATTTTTATTTTTATATTATTTAAAATATCGATTGGATG
AATAAATTGAAACTTTAAATGTTTTTACCCTAACATTTTTTTTTTATATTAAAAAAAATGGCTCAGCCCG
CGGGCAACACGCGGCCGACAAATCTAGTTATTATAGTCAAACCTCCAAAACTCATAAATCACTTGACCTT
CGCAAAAGACATAAAGAACACCACTCTTTGCTAAAAAAGCCTTCCTCTATGTGGCAGCATGAACACCACC
TCTCCTCTCTATCTAGATTCTAGCCACCTCATACCACCTAAATAAATCCATAACCCCAAAACTGTAATTT
TCTATAACCTCACCCACTCCTCTTCCCTTTTTAAACCCAACAAGATCCTCCTCTCCCCTTGCCACTCCCC
AGCCCACCTTCTTCTTCTGCCCCCCCGAACGCCAGTTCCTCTCTCTCTCTCTCTCTCTCTCTCTCTCTAT
ATCCCTCCA
Sequence ID: 112
Sequence Length: 3204
Sequence Type: DNA
Organism: Poplar sp.
GAAAGAACATCAAATGAGGTCATAATTAACTCTAAATTAACCCTAAACAAAACCACTAACAAATTACGAC
CATGTTTGGTGGTATCTCAAGGTGCTGTTAGAATCATCTCGTTGAGATCTTTTTAATGGTGCCGAATGTG
TCGAAAACAAAGCTTTGGTGTGTCCCAGTGACCCATTTTGGATATTCATAAAATTTTGAGTTGATTTTTA
TGCATGTTAATTATATAGCGAGGGACATGGTTTTTGGAAAAACTGTTATTCCCAATAATAGTTGTGTTCA
ATCGCTATTCTCAACAGCAGTTATGTTCAAACTATGTTATTTTTCTAATAATTTTCCAACATGTGTTACT
TTTCCAAATATCTTATGAAATTATGTTAGAATTCTAGAATACCCCTTGGCTCTCCTGTTTTCCTTTTGAT
AATCAGAAAATACTAGTTATTTGACTCGCACTCCATTGCGAATCGGATATTTGTTTTCTACAAAAAATTA
AACATGTTGGCTTTTTCAAAATGTTTTTTTTATATATATAAAATATAAAGTATACATAAAAAAGTTAATG
CATGCATCTAATTAAATAAATTGAGAACTATTTGTGTTAATAAATGAAAAAAAAGTCATTAACGATAACT
AAATACATATCTAGAAAAGTCAAGAGGCGAATGTAGATCAAGATATTTAATCTCATAACATGATATATTT
ACCCAATTATATTCAATTACTTTATTTATTAAATTAATTTTTTTTTATCTAATCAAATGATAGTAGAAAT
AGACACACACATATAATTGATTAAATAAAATCAAAGAAAAAAATATCTCACAAGGTTGCACTCATTAGAA
ATACCATCCAAAAATAAATATTTTTTATCTTTAAAAATAAATTTCAATTATATAAAATATAAAAATTCAT
AGATGAATTAAAATAATTGCTTCAAAAATTAAATACAAACAAAATAATAATAAAAACAACCACTATTTAA
AAAAAACTAAATAAAAAAAATAAAAAATTAGAGAGAAGGGGGTATTAATTTAAATATAAATTTTAAAAAA
ACTATTTTAAAAAAATTATAAAGGCATGTTTTTCTTAAAAAAGAAAGGCAAAAAAAAAAAAAAGAAAAAG
AAAAAGAAGAAAAAGGCCAAGCGCTACAAGGCTTGGCTCATCTAGAAAGGGCCTATGTGTTGACCCTTTT
TTTAAAAAAAAAATTGTCGTTTGCCCTATTTTTTTTTTAAAAAAAGAGAGGCAAACAACACATCATTTGA
TATTTCTCAAATTTCAGCCACTATGGTGCCCGAAAGAAACAAGGTCTATATTTTTTAGACATAAAAATTT
ATTTTCAACCTATTTTTGACTTAAAACACATAGAAAAGAATTTAAATACCTTTATAGCCCCATAAATTGC
CATAAAAAAAAACTAAAAAGACCACGCAAAAACTCGAAATCAACTTGAAATCAAAATCTTTTTATGTCTT
TTTTCATTTTTTTTTTATGATTCTTTTTCTTCTCTTTAAAGCTCAATGACTAAAAGGTGAACCAAACTAA
AAAGGATAAAAAAGAATATTGAAAAAATTATAAGGCAAAAGTCAAAACTAGCAAAAAGGCACCAATGCCA
ATTTTTATTTTAAAAAAAAGCTCCCACTTTTTCTTTATTTCAATTTTGGCTCTTTTTTTTTTTTTATTAA
CAATAAATTGGATTTAGTTTAAGATAAAAATGACTTTATACAAAGTAGATTGAAACCCATAAATTCCAAT
CAACACAACATCGAAAGGTAAAATTAAAAAAAAAAATTAATGACCTATAACAAAAAAAAAAAAGGATCAG
AGTTGACACAATAGTTTTAAAAAAAACAAAATGGCCGCTATTTTTTTTATTTCAATTTTGATCCTTCCAT
TTTTAATTTTTTTGATATAATAAAATCCAATTTGTTTTTTGTAAAATCGAGCATTAACATGACGTTGGAG
TTTTTTTGAGATCCTAATAACCATAAAAAAAACAAATCAAAACAAACCATCAACACCATATCAAAGCATG
GAATTGAAAATAAAGATTTTGATGATTGGAAAAAAAAATCAAAATGAAAAAGAAAAAGAAAAAAAATATT
TCAATCTATAGTATTTTGTATATGAGAAAACTTTTGTTTTCCCACATCTTTTATGTTATTGTTAATTTTA
ATATTAAATTTAAACTCTTTCAACTCTTCTTTTTTCTATATCTTTTTGAAGATCTCCAATAAGGCTTGAT
ATCTGTAAACTGTAAAGAACAAAATATGTCTATCAATGAAAAAAAATTAATTTTGCAAGTTCTTCATTAA
GTGTATAGTTCATCAGTCAGTAATAAGAATAAAAATTCATAATAATAACTAAAAATAGAAATATTTAATT
TGTGATTAAATTAGAAACAAAATGTTGTGATTGTTTTTTTACCTCATGAAAGTCTTTTTTACCTTTGTAA
ATGTTGTGATTGATTAAATTAGAAATAGTTAATTGTTTTTTTACCTTCGTAAATGAAAGTTTTAAAAGGC
ATAATACTTATAAGTAAATCAATAAAATTGAAATTTTTCAAGAAGCAACCAATCACAACATGAGTCTATG
TTTGTGCTAGAGTTTTAATAAATTTTGAATTTTTTTGTTTTAATTTTTTTATATTTTTTAATTATTTTAA
TGTCCTGAAATCAAAAATAAATTTTTTAAAAATAAAATAAATATAATTTTAATACATTTTAAAATAAAAA
ATAATTTAAAAAATAAATATAAGCAACATTATGCTCAAAATGCAATCATAATTAAATCTCTTAAAATATG
ACTCATTTTTCAAGTATTCAAGTTCAAAATAAGTTATTTTAGATTTTTTTTTATTATCCTTAAAATTTAA
ATAAGAGACAGTAACACGGGAATAACAACAAATGCGGGACTCCACAGTAAGGACACTTATCTTCTTCTTC
TTCTTCTTTTAAAAAAAAAAAACAAAATTAGAAAAGAAAATAAATGCTTGAGCTTAATCTAAACCCAAGG
AAAAATCCAACGGCCAAGATTGGGTTTAAGAAGAAGTGGGTGTCTCAGACTCAATGTCTTTCTCTATCTA
TATCAAGGAAGGCATAAAATAGAAGTGTTGGTGTCCTCTTGTGTCTTCAGAGTCATCGTCCTCTTTCACC
TGTTCTTCTTTTTTCTGCTTGAGAGTGAATCGATCCAAGCCTAACTAAATCATC
Sequence ID: 113
Sequence Length: 3185
Sequence Type: DNA
Organism: Poplar sp.
CCTGCAAAATGTGAAGGATAAAGTGCATAATCATTTCATTTACGATTGCTGGTTGTGGTCATTTACCTTA
TCCCTTCATTTATTTGTATTTCAGATTGTTCAAAACGGCCAAACCATTTTCACACTGTGGCGTCCATATT
TTTATGTCCTGACATAGTGCACCGCATTCTTGAGCAAGTGTAGCGGATTTATCTCCTTGGCTTCTTTACT
GAAGGTTTGGTAATTCTCCTTGCAGAGAAATCCAAAGCTAATCATGGTGTAATGCTTGTAACATTAAAAT
CTAGAGCTGATGATTTGTGACTGAGAGAGAAGAGTGATTTGTGACTGTAAAATGATTGAGTTTAGAATTT
AGACACAGCGGGTGCTTTTTTATTAAACTATGTAAAAATTCGTTGTATCTGTAACAGATACCAGTCGATA
AAATGGTTCTTTTGTCCAGCTTTAATTCGATACCTTTTGGTCATTCAGCTGAATTGTGGGTGCTAACTTG
TAAGACCTTTTTCGACTCTTCGCTTTTTCTCTCCCTGTTTTCGAATGGACTCAGATACTGGGAAAGAATG
ATTTGTTTTATGTGAGGCGAAGAGTGAAACGAAATGGCTGTTAGTTGTGTTCGGAAAGGTTTGAAGTTCC
AATTTTAGTACTCAGCAGTGCTTACGGTTGTGATTTAGAGTGTTAACATTTTTTTAAAATATATTAAAAT
AATATATTTTTTATTTTTTTAAATACTTTTTTATATTAATACATCAAAACAATATGAAAATATAAAAAAA
ATAAATTTTTATAAAATATTATTTGAAACGTAAATTTCAACCATAAACTAAGTCTTATGGGAAAATTATT
GTAGCTCAAGAGAAAAATAACTATTTATTACAATAGTAAGTTGAAATAGTGAAGTGACAAGTTTGGTCTT
CTCACCATGAAACACAAAGCTTTTTATTAGAGATGAGTTATTTATTTAATTGGGGGTAGCTTGGTATTTT
CTTATCTTATGGTGCATTGAAATTACTTATATGCTTTAAAAGCAAATTTTTTTTAACTTGGGTCTAGATG
CTCGTTGGACTTTTTATTTTTATAAGCATATTGTATAAGTATATTGTAATGACTATGTAGTTTTTAGAAT
TTTGTTTTTCAAAGAAATCTACTTCATCTTGGTTTTTTTCATAATTTTCATGTAGTTTTATGAGCAAATT
AGTATTTTTATCATTTTTCTACTCTCTTTGCCTCGATTAGTGTAATGCTCCTAAAAAATAGCAATAATCC
TTCAATTTATTTTTTTTCTTGAGATTTTAGTCTTTATTTTAATTGCAATTTTTTTATTTTAATTAATTAT
TTCAAATTAAAAATTATTTTTAATTTCATTCTCTTTTAATTTTTTTAATTTCTTATATTTAATTCTCTCT
TTTGATTGCTAATTTTTATAGGTGATTTTTCAAGTTGATATTTTTATTTTTTTTTGCAATTTCATTCACC
ATCTTTTTTTTTCCTATGAAGTTTGATCCACATTTTTTTATTGTTGTTTTTGCAAATTTTTTGAACATAT
TTTTTTTATTTCATTCTTCAATATTAAATTTATTGAGAATTGAACCTCTTTATTGAACTCGGTATATGAT
TTCACACATTGTAATTTTAGAAGATTAATCCAGGTGTAAAAGATTCATCCGAGTTTGCATAGTTTCTCGT
ACCACTAAATTAGAGTTGTCTTTTTTTATATTATTAAAATAATTGAGCTTGTCAAATCAGTTGACTTGAT
GATTTGAGTTTATAATTTTTTTCTCGATTTAATCCTTCAACGTTAAATTAGTTACGAGTTGAGATTTTTT
GTTAAACTCAAGTCTAAGATTTCACGGGTTTTGAATTTAGAAAATTAAACCATGATTGGAAGATTTACTT
GAGTTTGCGTGGTTTTTCATGTTATTAAATCAGGATTGTCTTTTTTTACATGTTATTGAATTAAATGATC
TTATGAAACACAAGCGACTCAATGGTTTGATTTTTGGATTTTCTTGACTTGTTTGGAAACACTTACATTA
CCTTGACTTTCTTTTTTTTATATTCGGTTAAAATTCTTCTAGCCTATGAGGTAGCGCCAACCACCAATCT
AGGTTTATTTGCGTCATTTTTTTTTGTTTTTTTAGATTTAATTTATTCTTCTCATTTTTTACTTTCAATA
TTTAGTTCATCATAATTGACCTTTATGATTTGTGTATAGGTTTTATAGGGTTATCACATTCTCCTGCCTT
GAATTACAGGTTTTGCAAGTTAACTATGGTTGGTCGAAGTCAATTTAATGCGTTATCATCTTAATATATA
TATTTTAAAAAACAATATGTCAATATTTAAGTACTTTAAAAGGTTTTTTTTTTATGTAGCATGTATCAAA
TTTTTAAGTTCATGATATTTTTATATCTTTTTAAAAGATTTTAAAAAAATTATCAGAGATCTATATTTTG
CGGGTAAAAAAAACTAGCTAAGTTTTAAAGTTCAACCTCTTAAAACACTATTAATAAGATAAAAATATAT
AAATTAACAAGGTTTATAAATTTGTCAATTAAAATGTTATTATTTTTTATATTAAAAAAAAAAAGCGTAC
ATGCATTGCCGTGTGATAATTTAATCATACCGGGTTGGTAATCTCGCTTTAGGATAAAAAGACTTGAAAA
TTATATTTTGATGAATTTAGCAAACTTAAAAATTTTGTATAATGCGGACTAGTGTCCGTACAAAAACAAA
TTACCACTTTTTAAATCAAATCCCATAATAATAATAATATAAAAAAAAATGTATTGAAGTAAAAAATTAT
AAGAAATTTGAATTTTAAAAACTTTTCGATAATCAAACAAATCTCAGTAACAATAACAAATGCAAACACC
TCAACCCATCCCAAACAGTACTACCCCAAGCACACCGTACTAACTGTCAATCAGTTAAATCCAATGGTTC
AAAATATCCCATTTTTAACTGTTAATCTCTTAAATCAACGGTACAAACTTGCCCGAAATCACTGCTATCA
TTGAAAAAAAAAATCACAACTTTAGAAACCCTAAAAACCTTCTACTCATCTAAAAATGCATCCCCTATAA
ATAGCACAAATTGATAAATCAGTTGCTCTTCACACTATCTCCCTATCCTTTCTCTATCGGTATTTTGTTT
GTTTTGTGATTGCAACTCTCTTATCAATCGCGGCC
Sequence ID: 114
Sequence Length: 3115
Sequence Type: DNA
Organism: Poplar sp.
ATCTCATACATGATTGGACTCAACTTATATGTGATGAATCCTCCTTTGCAGGAATCAAGTAAGAGCATCC
AGACAGAAGCCTTTCATGTTTTCAAGGTACAATTTAAAGAAAGAAATTGTGAATGTTTCCTCTTTGATTC
TTTAACTTCATGTGCTTTTTTCTTTCCTCTCTTATTGATTTCCCCCCCCTGTACTGCAGCTTTTTGTTGC
AAACCAAAATAAACCTCCCGACATAGTTAGTATACTTGTTGCAAATAGAAGCAAGCTTCTTCGTTTGTTA
GCTGATTTCAAGATAGATAAAGGTATAAAAACGTAATACATGTCTAGTGAAATTATGCTGGCTTCAGCAC
TGTATTGACATTTTTTTTTTTTTTTTTGCAGAGGATGAACAATTTGAGGCAGACAAAGCTCAAATTGTGA
AAGAAATAGCTGCCCTTGAACCTAGAGAGTAGCCATGAGTGTGCCTGGTTTCTTGTAATCATTTTACATA
ATTTACAGCTCTCATACCCTGATGACAATATCAGTATCCAACGAATATATGTTAAAACTGTATATTCTTG
TGCGAAGGGAAGAGATAAATAAAAAGACATGAATTGAGTTCAATCCAATACTTGGCTTTGAAGATTGTTT
TAATGGGTGGCAAAAGAACCCTGTAAGAGAAGGAGTTCATGTTTTATCAACCTCTTAGCTTCACCATCTG
TTCATCCCTCCCCCTTCTCTTGTAGACAAAAGTCACAAGGACAGCACAAAAAGAATTGTGGAAATGAACT
TTAAACTTGCAATTTATTTATTTCAAAATAGAACTAATGAAGTCTGAGGTTTACAAGACCACCTATATGT
ATGCCAGAAAACAACAGTTTGAAATTTGAAAGCACAAAGGAAATTGAAACAAATAGTAACATTTGGGCTT
GATTTCTAATTTTGGGATATTCAACGGTTCAACATGCAATATGGTGGCTTTCTATTAGAACATTACTGGT
AGAATTACTTGAATTTTTTTTTGTTTTAAGCTGCTAATTTAGTTTGGCACGATTATACCTTTTCTTGTAC
CTGGATTTATTTTATTGGTCAATAAAAATATTTGTTATACTATTAATATAGTTTATTTTAGTCAGATTTC
TATCAAGTTGTGTTAGATTCTCATTTCAGAACCTTTAATTTTTAGGTGGACTGCATCATCTTTGTAACAA
CTTCTGGTTCCTACTGTATTTTTATGCATTTAGAAGATCTCACCACTTCTATGCTAACCATTAACCAAAC
TTAACTTAGGGTATCTTTGCTAATGGAGATAGAAGTATTTTCACTGTGGGAGTTAATAGCTATAGATGTC
TGTGGTCAGACTCAAACCTAATCTCATGGAAGGAGAGTAAGCAGCTAGCAAATGTTCATGTGCTAAAGGA
TGCTAAAAAAGCACATCGCTATGCTATTTCCACCCTCAAGATTATCATGGTGGCAGTGGTGGTCAAGGAC
AGAGCTAGAAATTTTGGGGAATTAGAGAAAAGTTTAGGAGGACCAAAATTTAAATTTTTTTATTTTTAAG
ACTAAAAATCTAATTTATTGAAGAAGGGAGGCTAGGGAAAAAATATTTTCTTGCGAAGGCCTCTGTCCTT
GCAGCCCCCTAGTGGTGGTGACTGGAGATGGTACAAGGTACATGAACCTTCCACAATTATGGGTTTTCAT
AATTATGATTGACATCGGAGTCACCGGTGAACGTCACCAAACACTGCAAGCACAAGCATATTCCAAGCAT
CTACTTCCATTCAAAAGCAGAATGTTCTCTGCTTTGACTGTTAGTCTGTTACTAGCACTCTTCGTTGTCA
TAAAAAGGAGATGCAAAAAAGAGTATAAGACAATGGGGTGTTTTCATTTTGGAAAATCTACGACTACACC
CTCCAATTATTGTGTAGGTTTCAATTTGGTCCTTCTCCTTCTAATCTCATCAATATTGAAATTGTGCAAT
CCCTCTTCCTCATTAATTGGATGTTAATTTTCCCATAAATTGCCTGCAAAAATCAAGTTTTCCAATTCAT
ATCAAAATTCCTCATTCTTAACCTTCCAATTTAATTGCCTTAATTTATGCTTAGCAAGTGACACCAAATT
AACTATCATTCATGTTTATTATGTGACTTCGAAAATTTCTATCATTTAACATACAACTATTTTTTTAATA
ATGAAATTAAATAATAAATGTTTGTGAATATAATTAGAAGGTTAAAATGGATTAAATTAGAAGTAAATTA
ATACACAAATTAGCATCTAATTTAACAAAACAAATCACCATCCAATTAACAAAAAAAAAAAAACAATTTG
GATAAGTTAGGGTATCATCGCTACAATCACAAAAAGAAGAACCAGACCGATACCTATCCAAGAAATGAAG
AGTATATTAATAGTTTGCCCATAAATAAAAGGGTTGAAAAGACTCAAGAGAAATCATTGAAGGACTTAGT
TTATTTTTCACCTGGACTTTGCTGCAAGAAGCATTGTTTTAAAATGGGATTGGCCCGGGTTGATTCAAGA
CTGTACTGACTCAGGTTTAGAGCTGCTAAAGTTGAAAAAAAAACTTATTTGATCTAGTTAAAAACTCAAT
TAATCTAATAACCCGGTTAATCTAGGCCCGACTCATTCAAAAATCAGTAGGTTGATCGAGACCTTACTAA
CTCAAGTCTAGACCTGTTCAAGTTGAAAAAAAATAGAAAAAGATAAAAACTAGTTTTGTTGACCCTTGTA
ATTCAATAAACTCGAGTCAAACCAATTCAAAACTCAATCATCAACCCGTTAACCTTTTCTTTTTCAAAAA
AACCAGGTTTTTTTTTTTAATTCATAACCCAAGTGTTATCCCCCGATTAACAGGTTTTAAAACTATGGCA
ACAAGGACGCTACTACACTGGAAATCCAATCAAAGCAGAAAAAGAAAGGCAGATTCCTCACCATAAAACG
TGCTATATAAAAAGAGGAAAAAAAAAAACAGAAACCAAACGGTCCTTTCTGTGGCTGGCTGCTGCTTCCT
TATGTACGTAAAAAGACACATAGCCTTTCATCATTTTCATCATTATCACCACAATAATTGACCTCCCTCT
GCCATTCTCTTCTTTGTGCATTCAAATTTATAAAC
Sequence ID: 115
Sequence Length: 1726
Sequence Type: DNA
Organism: Poplar sp.
CCCAATCCCCAATAAATGAAATGCCGGAGGATAAAATCAAGGAAAAAAAGTGATCACATAAAAGGACTAAAAAA
ATAGTAATAAAAAGAATGAGAATAAAAATAAAAAAAAAATAAGGCAGAGGGCAGCTACAATTTTTTAATCAGAT
GGTGAAATGAAAAAGAAAATTAACTTTAATGAAAGGGGAAAAAAATCAATAACAAGTAACAAATTGAAAAAGTA
ATACACCATAAATTTGGATTGAAAGATGAAATTAAAAACTAATAAAACTTTTACAAAAGAGTTACAGAAAAAAA
TAAAAAATCAAAAGAATAAAAATCAAATTGAAAAAAAATAACATATGAAAAAATAGGATCGAAGGATAAAATTA
AAAATAAATAAAACTTTTATAAAAGGATCAAACATAAAAATCAAAAATAAAAAAAAGAAGGATTGAAGTTGAAA
TATCAAGAACAAAGAAAACCAACCTGTAATTTTAAGAGAAGAAAAGAGAGAAAAAAAAAAAACCCCATTGATAA
TAAATCATCTAATCACCATTGACATGTGTAGTATTAACAAAAAAAAAAAAAAAAAAAAACAACAACAAAAACTC
ATCCATCAACATGTAAAAAAAAGACATTTTTCCACTGGGAGGAGTCGCAAAAAAAAGTGAATGATAAAATATGT
CAATAACCATAATGAATTTATCTTTTGTTTTAGTTGTTTTGTTATTTTGGAATTATGCCGGAAGGCTCGTGGAA
GCAAAACTAATATTTTACTATATACGATATAAAAATCTGATACTAAATAAAAAGTAAGGTGCACGATAATCAAT
ATAATCATTTGAATAAAAAATATATTAGGTCAAAAAAGAAAGAAAAAAAGCTGATATCACGCTAACTATTAATT
AATCTGGAGATCTAAAATTATCTCTTATGAAGGATTCCTTGTAATTTTAATTATTTTCTCTTTTATTTTTAAGT
TTAAATTACCTCAATTAATTTTGGACTTTGGATCAAATTGAACTTAACCTTTGATATTTGAGTATCATTAAGTA
ATTAAAGTTAAAAATAATTTCTATTAATGTAGCCATTTTTAATTACTGAAAATCACCCCTCTATTCTCGTTATT
TCTTATTTTATACTAGCCATTCTCAATTTCACCCCTCCTTTGCCCTTACTTTTTAGTTTTTACATGTCTTTTAT
GTCATCCTTTTCTCTTAAATGATAATATTCAACAAAAAAGTATTAGGATTTTAAAAATTAATTCACTTGCCAAC
AGCAACGTGGCGCTTCTAGGGAACATGATGAGGGTTGGTTCTGAACAAGTCTAAACTACAGGGGTCAAAAGGTA
ACATGTCTAAATATATGAGATGGAAATTTAGCTTACCATTATAAGAATCACATAATGGGCCTCGCCTTCGTAAG
GTGGGCTCTATAACGCTGAACCCCTTAAACCACTAGAGCCCACGTTTCACTGCCTTTAAAACCCCCCTCTCCCT
CTCGTTTCCAAACCCTAGAGATTATTTTGTGTTGCAGCAGCGCAGCCAGAGATTAGAAGCAACCAGCCTCAGAT
CTTATTTCCACAAGGTAAACAAACTTTTCTTCCGGAACACTGTTTGTTTATAGATAGCTGGATGCAATCGTTCT
ATTTTTTTTTTCTTTTTGCGTTTAAATCGTTGATTGCTGAAACTTTGTCTACTGATTTCTTATTTTTTCTTTGA
TTTTTTTTTAATGGTTAAAGAAAG
Sequence ID: 116
Sequence Length: 3035
Sequence Type: DNA
Organism: Poplar sp.
TAGTCGTGACAAGAAAAGACCACTGGCTCAAAGGACACAGACTTCTATGAGTGCTCTTAAAGAAACAGAA
CATACTCTCATGTTGATGTGTGTGCACTAGCTAAACATTGGAGGTGATGGGTTAAGGTCATGAAAGAAAT
GGATTCAGAGCTGCTGGAGAAAAGTATTCATCTATTAGCCTTTATTAGTCCAGGAACTCATCGCGTTGGA
GAATCTTCCAGAGGAGTTAGAATTCTGCAAGAAACCATCATTTTTAAAAAGCAGGAATGGATTGTTTTCT
CTTCCACCTCTCTGTTGTGCTCAAAGCCCATGTCTTCTGCTTTCTCAGTCATCACTACTGCTACTGTAGG
CAAGGGCCATTCAACTAAATTACCAATCCAGTTTCTTCAGACTTGGTTGCCCTACATATTTATAGGATCT
CTTTTCTTCTCTTGAAATACCTCTGTATGGAAACAGAGGGCGCTGCTAAAAGATCAGAGGAAGTGGGGTT
TGCTGATCTAACTCAGATTCCTGAGCTGCCAATGCCGGAGATATTGCATGGCTTGCAGGTAAAAAGTGCT
AAGTGCTCCTGTATTATCATCGACTTCAGTCCTCTCATTGAAGGGATGTAAACGGTTTGAGATCATGAAA
TTGAGGGATTACTTTTGTAATAGTGACACTTCTCTGAGTAAAAGTTTTCACCATTGGCAGTAAATGAAGT
TTCACCATCTATGAGAGATTTCTGTGTTGCTTTTGATGTGAAAATACTCTATGCTTTTGATGCCTGTACT
GACTTGTTATATTTTAAAATGCAGGATCAGGCAGTTGCTGTTGTTCCGGAACTTTGTGGTTCTAACAAAT
CAAGGTACATCAATCCTGAAATCCAGTCAGTCTGTCTCTTACTACTACAGATAATGGAGATGGCCCTATA
TTTGGAGTTCTGCGTTTTACAGATTTGTGGAAGAAGCCCTGTATTAGGGCGTGTGGAGGAATTTTCGAAG
GAAGCAAAATAGTTGTCAAAAGGTAACAGCCCTTTCATACTGCTAACTATATTCTGAATTAATATTTTAG
ATTTACTATTATAATTGCCTTTGCTTTTTTTTTTTTGTAAGCCATGGAAGTCCATGCATTCTTTAAAGCA
TCAGTCACATCCTTGAAACATTTAACATCTCTTGTCTATCCCGTATTGTTACAGACCGAAGGTTTTAGGC
GAACTTAGTTGGGTGAGTAACAGATCATGAAAATCCTGTACAGATATCAGAATTAAGCATGGCCAAGATA
TTTGCATGATTACAACGTAAAACTCTGTATAACATCAACATGTGACAATATCAGAACCATACATCATTGA
TTATCGCTTGGATTTTCATGGTTCCTCTAGCTCAGTGAAGGAATATCACACAAATATAATGAAGATGGTG
CCAAATATCATCGATCTGGCGTTGTTTCGCAGTCATCCTCTTTCCATGATTTTAAGGTGCCCTGTTACAA
GATATGCCTTCCCAAGGGATTTTAATTATTTCTCGATCATGCACCGATGCTGCCTTCCAGCAAGGGATTA
TAATTATTTCTCGATCATGCACCGACTGCTGTAATGATGTAGGGAAATGAATTTTTCTAGGGGGACTGAA
TTTTCACTTTTGTGCTTGAATGGGCCCTGCCCCCTTTGCATGCGTGATGCCACAAGGTAGCATGTTTTTG
TGGTGAGACAATTGTTGAAAAAAAAACAACTGCATATTATTGCAGCTCTTGACAAGACATGTATCTTTGT
CTCTCTTTTTATGTAGGAGGTAATGCTATTCATCCAGGAACAGGTCTCAAGTAATTAGTTACTCCAATAG
TATCTATCAATCATGCGTTGTCATGTAGAATTTCCCTTCATTGATTCCAGATCGATATCCATGTCACCAA
AAATCATCTTGAAAAATTAATCTGGTATTTATGATTTTAGTGGCAGGGAAGTTTTTTTGAATTTTTTTAG
ATTTTTTTTATGATTTTATATAATTTTTGATGTGTTGATGTCAAAAATAAATTAAAAATATATAAAATAT
TATTTTAATATATTTTTTTAATTTTTTTTGAAATTGCACTAAATGCTGTCAGTTTTTCTTTTTATAGTTA
CAAACATTCTATTTCCAGATGACTGTACTAAAAAAAACATACCGTTATTATTGATATATTAAAATAATAT
TTTTTTATTTTTTATAATAAAGTTGAGGAATTTCAAAGAGATTTTGCTGGCGTGTCAAGCATATTATCAA
GTATTTTTTTTTTTTTTAATTATCATCCAACTACGGTAGTGGGCTTAGTAAATGAACGGGTTCCTTAACG
GTAGTGGGCTCCCCTACCACGTCACAGCTGTCAGTTACCACGTTTATTCAATAATTTATTAATGTTTTTT
TTTATTTGCTTAGCATCGAATAGTTGTTTGGAACTGCCGTTTAAATATATTTTTTAAAAAGTTTTTATTT
TTTTATTTTTAAATTGGTTTGATGTTTTAATATTAAAAATAAATTTTAAAAAATAAAAAAAATATTTTAA
TATATTTTTTTAAAAGAAAATAAGCTTCCGATGCACCGGAGAAAACTTGGTCACCGACGATTAGATCATT
AATGCATAAATATGATATTCATCGTTGACATTCACTAGAAAACAAAATCAATAAGGCCACCTGATTACTG
GTGTTTTTCAAGATAAAATCCAATCAAATCACTGACAAACATTAATCATGGCGCATGAAATTTGTACGAT
TTTACCTATCCCTCATAAATCTCGCCGTATCCGAACAAAACCACTTCCAAACGACGCCGTCTCTCCACGG
TGATAATAAAGCCAAAAGGCATATACCACTTAGGATCCCTTACTTAACCCTAGTCAAAGCAAGCCTGACC
ACAGTTAATCCCAAACCACCGCGATCCTTCCACGTGTCCTGATCTAGTGATCCAAATCCACCCTCTCGCC
CTATAAAGTCACCCCCAAAACACCCGGAAACCCTATCAAAACAACTCTCGTTTAATCCTTCTCGGAAATC
AAATCCCTAATCTCTCTCCTTTACA
Sequence ID: 117
Sequence Length: 3062
Sequence Type: DNA
Organism: Poplar sp.
CAGTTCTTCTTACACCGATATTCTGGACAACGTGATACCTTATGTTTTTTCAGAGAAAGCTGATCTGATT
TCTTATTATCTCAGTGCACCTGACTTTCCATCTGATAGTCATGACAAGAAAAGACCACGGGCGAAAAAGA
CAGAGACTTCTCTTAGTGCTCTAAAAGAAACAGAGCATACTCTCATGTTGATGTGTGCGCTAGCTAGACA
TTGGAGGTCATGGGTTAAGGTCATGAAAGAAATGGATTCAGAGCTGCGGGAGAAAAGTATTCATTTATTA
GCCTTTATTAGCCGAGGAACTCATCGCTTTGGAGAATCTTCCAGCAGAACTGCCCCCCTCTTATGCGCTC
CTATCCTTAAAGAGGAGTTAGAGTGCTGCAAGAAACCATCATTTCTAAACAGCAGGAATGGATGGTTTGC
TCTTTCACCTCTCTGTTGTGTGTCAAAGCCCAAGTCTTCTGCTTTCTCAGCCAACAGTAGTGCATTTGTA
GTCAAGGGACAGTCAACTGAAATTACCAATCCAGTTTCTCCAACATATTTTTCAGACTTGGTTGCCCTGG
AGATCTACAGGATTGCTTTTCTTCTCTTGAAATATCTCTCTATGGAAGCAGAAGGTGCTGCTAAAAGGTC
CGAGGAAATGGGATTTGTTGATCTTGCTAAGATTCCTGAGCTGCCGATGCCAGAGCTATTGCATGGCTTG
CAGGTAAAATTGTGCTCAGTGCTCTTATATTATCTTCGAGTCCACTCCTCTCATTGAAGGGATGTGAATG
GTTTGAGATAATTCAAGTTCAGGGCTTACTTTTGCAATAGTGACTGCTGGTACTTCTGGGCCAAAATTTC
TAGTCTTCCAAAATTGAAGTTTCACCATCAATGAGTGATTTCTATGTCTCAATTGATGTATAAATCTGTC
TAAACTCTATGCTTTTGATACCTGGTCTGACTTGTTATGATTTAAAATGCAGGATCAAGCAGTTGCTATT
GTTTCTGAACTGTGTGGTTCAAACAAATCAAAGCACATGAATCCTGAAATCAAATCAGTCTGTCTCTTAC
TACTACAAATAATGGAGATGGCCCTGTATTTGGAGCTCTGCGTTTTACAGATTTGTGGCATAAGACCTGT
ATTAGGTCGCGTGGAGGATTTTTCAAAGGAAGTGAAATTGTTATTAAAAGGTAATAGCCCCATCATGCTG
CCAACCATCGTTCAAATTTAATCTCTAGATTTACTATAATTGCCTTATTTTATTTTTTGCAGCCATGGAA
GGGCATACGTTCATAAAAGCATCAGTGACATCCTTGAAACACATAATATCTCTTGTCTATCCTGGATTGT
TGTTACAGACCGAAGGTTTCCTGTGAAGCACTTGTGGAAGAATAGGTAAACTTAGTTGGGTTGGTGACGG
ATTATGAAAATTGTGTACAGATATCAGATTTTGGCATGCCCAAGATTTTTGTAAGATTAGAAAGAAAATT
CTGCAAGCCATTATTAACTTGTGTACAATATCGGAACCATACAGCGTCGATTATCACCTAGATTTTCATG
GTCCCTCGATTTCAGCTGAGGAATATCACGCAAAAAACATGAAAATGGTCCCAAATATCATGAATCTTGC
TTTGTCCTGTAGTCATCTTCCTTTTGTGATTTAAAGGTATCATGTTGCACGATATGCACTGTTGTAATCA
CGTGGGGAAATGGATTGATCTAGGGGACTGTTTTTTCTCTTTTGTGCTTGGAAGGGACCCGCCCCCTTTG
CATGCGTGATGCCTCGAAGTAGAATGTATTTTCGGCGAGTCAATTGCTGTAAATACAAAGCTTTTGATTA
TACTGTCTTCGAAAAAATTACAGAAATTTATTATGTCTTGTCAAATATGTTTCTGTCTGCTACTAAAGCA
ACTAGAATTCCTGAGAAGAAATGTGTCTTTTTTTCTTTTTTATATGCCGATGGTAATGCTATTCATACTG
GGAATGATGGTCGCAGTGATTGGTTTCATTTTTTATTTAGAAATATATTAAAATAATATTTTAAAAAATT
AATTTTAATATTAATATATTAAAATAATTTAAATATATAGAAAAATTAAATTTACTCAACTTTTATTTAC
AACGAAATAATAACAAATGGGGAGTCTGGCGCAAACTGATATCCTTCAGACCAGATTTCTGCCACTGGCT
TCTTTGTAATTTCACAAAAAAAAAAAAAAAAAAAAGGGCCACTTGCATTGTCTCGTGTAACAAATGTTTC
TTAGAAGCTTCTACTTTTGAAAAAGGTGGCATTATTTTTTTTTGTTTAGGTAAATACAGTATCCCTTAAC
AATAGTATGGTTAGGTTGAATGTCGACAGGTTCCTCAGTGCTAGTAGGCCACCCTGCCTAATTATAGCTT
TCAGTTACCATGTTTATTGAATATTTCAATACTTTATTGACATGATTTTGATTTGTTTAACATTAAGATG
GAGGTAGTGTTTATTGAATATAAAGTATTTTGTATATATGTTAAAGAAAACACTAAAAATAATAATTTAA
ATCTGTAAAAAATATATATATATATTATTCAACCACACTCCCGTGATTTAATCACCTACCATTAGGATCA
TTAATGCACAATCTAATCTTACTGGGATTTGAAATCAAAATCAATGAGACTACCTTAAACAATCTCCACC
GTTAGATTATCTCAGATTTCTCTCCATCAATTCACGGTCCACCATTAATCATGGCCCATCATGCACGAAA
TTTGTACAATTTACCTATCCCCTCATAAATCCTAACGAAGACTTGCCATATCCAAACGAAACCACAGGCC
CCACCAAACGGCGCCGTTTCTACACGGCGCAAATAAAGCCAAACAGCACATGCCACTTAGGATCCCTCAC
TTAACCCTAGTCAAAACAAACCTAACCACAGTTGAAGTCCGACCACCTCGATCCCTCCACGTGTCCTGAT
CTAACGATCTAAATCCACCTTCTCTCCCCATAAAAACACCCCCATATCACTAAAAATCCTAAACAAATCA
CCCTCGACTTCATCTCACTTAGAAGGCTAATCCCTAATTTCTCTCTTTCATA
Sequence ID: 118
Sequence Length: 3093
Sequence Type: DNA
Organism: Poplar sp.
AAAAATTGATAAAAATTGTTTTTTTTATAATTTCACCCTTTTATTTTAAGTTGTTTAATAATTGAGTTTC
ATAATTTTATTTAATTTACTTTTACACGGGGATATTCTGTTATCACAGTCTAATCACATATTTGACGTGC
TAACCCGGATGGATTCGAGTTGAGTTTTTTTTTATTGTAATTTTTTTTATTTTATTTACCATCATTATAT
TTTTTTATTCTTGATATTAAATTATTCGAGTTTATTAAATCCAATCGAGTTAATGACTTATTTGAATTGA
CCTGCAATATAGCGAAGATCACCTATCCAGCACAAGTTAATAAAATGAAGGGAAAAACAATTTTACCATG
ATTTAAAATTAAAATTGTTGTTTAAAAACGAGAGGGGCTTGTTTTAGCACATTGAATGAAAATACTAAAC
GAACATCTGTAAATTTGATGGAATTTTTAACTGTGATTGAAAGTGAATGAATGAAGTGATTATATTTTAG
ACAAAATCGATAAAATAATAAGTTTTAAAACTCAATTGATAACGGATAACATTAAGTTAATTTCGGCTGA
TCTGTCAAAATCATAGGGATAATTTTGAAAAAAATAAAATGAAAAGCTCAATTGATTAAATATTTAAGAA
AAAAAGGTAAAAAATAGCACTGAATTAAATAAAAACTAAGTGAACTCGAGTCAACTAAATAAACTCACAA
TGCAAGTCATGCACGTCATCAGATGCAATAAGTTTTTTATATCATAAATTATTTTTCATTTAATTGTATG
ACGATAAAGCACATGGAAATTTTTTTGCCTGAAACAATTTTTTTAAAGGAAAAAAATTGTGATAATCATT
TATAACAAATGATAAAATTATATATTTTTTTAGTTTCGAGCTAGATAAAAAAATAGATCATTGATAATAA
AAGATGAATTTGTATTTTTTTAAATCAAGGAACAGAAAAAGACATTAAATAAAAAAAAACAAAGAAAAAC
AAATAGTAACTCGAATGCCTCATATTAACTCATTAAACTCGCGATCCAGTTCATTAACTCAATTAGGTTC
AATGATTTATCTTATCAATTTTAACCCAAATATAAAATAGAAAAACTTTAAAAATTAAAAAGAAAAAAAA
AGGAGCCCAGGCACGTGGGCCTGGTGGCCCAACGTGCATAGGTATTAAAAAATCATCTCAGCCTGCGTGC
CTCGACCTTAATTTTTTTAATTTTTATTTTTATTTTTTAAGGAAGCAGATGACTTGTCGCCAGTTTTAAT
TTTGTTGTTGTTGAAATAAAACAATAGATGATACATCGTTTGTTTTCTATAGAATCCGTGATTGGAGGTC
ACTAGAAAAATGGGGCATTGATTTTTTTTTGTCTTAGAAAATTATTTTCAACCCATTTTGACTGAAAAAT
ACCCTAAATACCTTAATAAATTTATACGTGGCTTTAAAAAAACCTTAAAAAATTCTCATGTTAGATCCGC
CTCCTCCGGCAAGGAGAAAAAAAAAAAACCATCTAGGTAAAACTCTTCTTATAAAATAGAAACCATTGAC
AACGATTTCAAGTTTTCAATCATCTTTATAACCAAAATCTTCGTCAACGATAATTTTCTCTATCTTCATG
GGAATCCGACGGTCCTCTCTCTTCTCTTAAAAAATAGATTGAAAATTGAGGGGAATGAACTTTGATTGTA
AAATTAAAATTATGACAACTAAAGGGATTGATCATCTATAAACTAAAAAACATGAGGGGTCAAAATAAAT
TTTTTATATGAAATTTGAAGCCATCACTTATTTAGTTATTTTAACCGGTCATTTTCATTTTGATCCTTTG
TTTTTCAATCCAATCATCTCTTTAAAAATATATAATTATGTGCTAATTTGAACTAAAAAAACTTAATTGC
ACAAAAATAAAGTTTAAGGACTAATAAAAAATAATTTACGAGAGAGTAAACAAAGCATCTCCAACAGATA
AAACACCACACGTTCTTAGTTTTTGTCAATGTAATGGGCGAGCAAGGTTTCATCACTCGTAAATGATGGC
ATCATTTAGAAGAATTAATTTTTTGTCAATAATAATAAAAATTGGCAAATGAACACAAATTATTATTATT
ATTTTTTGAAAAATAGCACTCACTTTGGTAATTTAGAAGAATTAATGTCCAAAGAACAGAGAGGAAAAGA
ACACGAGACAAACTAGGAAGCTTCCTTAGCACATGCCTTGTCTTCAGAATCTGTCAGATAAGGAGGGAAA
CAGGAGCGTGTGAACTCGAAAAAGAAAGTGATGGATCATGGACATGTTCCTCCCTTCTTGGATAAAAATT
TACCCTATCAAGCTAAACGACATCGTGTCTTGTCCATCCATTTTCTGCACATCTCTCTTTTCATCCTACC
AATAGGGATATGGAAACTGGTCCTCACGTGTTCGATTTTTTTATTTTCATATCACATCTATTATTTACTG
GATAATAAATTTAAATATTCATAAATTATTTATCCGTTTAGTTATAGGAATTCAATAAATATATATTATT
TAATAAAAAATAAAATAATATTTTTTTATATTTTTACATCTTTTTGATGTACTGATATAAAAAATAATAA
AAATATTATTTTAATGCATTTCTAAACAGAAAAACACTTTAAATCCAATCACCATCATAATTTCAAACAC
ACCTTTAGTGTTGACGTGGCATTGCCCATAACATAATCATATTGCCTAGCTCAACTTTATTTGAATATTT
TTGTAAATAAATAATTAAAAATTTATAGTACAAAAAATCGATTATCCTCCTACATAATAAGAAAAAAAAA
ATGGTAAGAAACAACAGAAAATCAAAATATAGAAACAAATAAAGGAAGAAAATGTGGGCTAGTCTGGGCT
GGGCTTGAGAAAACCCATCAAACAATTTCAAACCGGACCAGCCGATAGGGCTCGAGAAAAACCTATTTCT
TAACGTTAACATATTTTAGGGTTTGGGGGCTTCTTTTAACACTCTATTCTACTGAAAGCTGCCGCTGTTA
TATAAACAAAAAAATTATTTTCTTAGGGTTTGTGGCCTTGGAGAGATACTAGAGTTGAACAGAGCTGCTA
CTGCTCAGGAACC
Sequence ID: 119
Sequence Length: 3064
Sequence Type: DNA
Organism: Poplar sp.
TAGGATCCACAAGAACCAGATGTAGACAATGAAGAAGAGAAGAATAAAACCTGCAGAGAAGAGTTGTTAC
CATGCTAAGGTCAAACATTAAAAATTCACATAAAGGCACAAAAACAAGCTCTCCTGTTGATTGTTCAGAT
ACGTTGTTTGAGGTTAAAGGGTGATGATCATGGTACCTGGACATAACAATATCTTCAGAAAGCGAGTTGT
TGATTGCTAAGGCATCCATCACTTTCCTAAGCACCTAATCAACAACCACAAAACTTAAGACACTCATTTG
TACACAGACAATCAACAAGGCATAGGAATACACCTACCTCAATCGTAGATTGCCAAACATCAGCAGAAAG
AGAAGACCCCACTTTTTCAAACACTTCACCAAGCATAGTAAACATAACAGTATAAACCTCCCATAAACTA
CTATACTTAGACACTCCCTTTCCAGTAGCCCCAGCAGACCTTTGGTTCCCACTACTGTACGACGAGCTAA
CTAACTGTGCATGAGAGCAGTCAACAATTCGGAGAAGGAATTTCACTAACTGAACATTATCCGATAGCAA
ACATTTTTGCTGATATTCACTCACAAAATACCTACAAATTTTAAAAAAAAATAAAAATAAATAAATAAAT
GAAAAACATATAAAAATTTAGCAATCACCAAATGAAAAACTAACCTTACAGTCTCTATACATTCGACAGC
AAGACTAACATTAGCAGTACCAGCTTTTCCGAAAAAGAATTGCAGCATTTTCGCATACGAATCAAGTGCA
ACACTCCATGAATTAGAATTTAATTGCAGCGAAACGCGTTGCCTTTGGCATACATCATAAACCTAATTTA
CAAGATTCAAATTCAGTAAAAAAAAACTCACTAACACTAACAAAAATTAAAAATTTAAATTATTTTTACC
AAATGTGAAATGTGAGGGTACACTGAAGTGAAATCTTGTGATGAATTTGCCACCAATTCCAGTAAAAATA
TCAAATCAGAGGTAATCTGATCAAACAAAATGATTAGTAAGTTAATGCAAGAGTAATTTAGGAGTAAATC
AGTTGATTAGTGAGGATTGAGATTGATAAGTTACTTCGTGAGAAGGGAGATCGGAGGCGGCGGGGAGAAG
AGTGGGAGAGGAGAAGACTAAATCGTGAAGGAGTTGTGGAAGTGATTTTGATTCTGATTTTGGACTTCGA
GTTGTTAGGGTTTCGTCTCTTAGAGTGAGAAATGCTGTTCTCCAGGTTCGGATTATCGGCGGCGGCGGCG
GCGGCGGCGGCGGCGGCGGCGGCGGCGGCATAAAAGCAGAAATGATTTGTGGGCGGGGAAGAGGAGCTGG
GAGTGTTTATAGCATTTCTTGTGATGATTTAATTTAAATGAGTGCTAGTGTTTTAGAACTTGTGAATTGA
GGTGGCACTCTATTACAGCAAATATGATTAAAAATTTGATTTCTTGAAAATTAATTAGAAATCATATTTA
AAATTGAAAAGTAAAATATAAAACAAATATTGATTTTAAGATTAAAGATAATCTTAATTTAAGGTTGTTT
GGAAATGAGATTGTTTTTCAAAATATTTTTGTTTATAAAATATATGAAAATTATTTTTATTTTATTTTTA
AAAATTACATTTAAGTTTAGCTCAATAAAATTAAATATTTAGATATTTAAAAAAAATAGTTATAACAAGA
TTTCGATAAACCGCACTCCTAAAATTAATTAGCCTCCAATTTATTATTTGATTATCAATTGAATATCAAA
CTTGTGATTTATTAATTTTGTTACAATAATAAAAGATATTTAGTTTTTTTAAAAAAAAACTATAAACTCA
CGAGAACTTCAAATGCAAATGAATTTTCTCGGGAGAATTAAGATTTCGTTTATTTTTGCGTTTAAAATGT
GTTTTTAAAAAAAAAATTAATTTTTTTATTTTTTTACTTTAAATTAATATTTTTTGGTGTTTTTAGATCA
TTTTGATATGCTGATATCAAAAATATTTTTTTACTTTAAATTAATAAATTTTTTTTTTTACAAATTAGGT
TTTATAGGTCCACACACATGTTTTGGGGGTGAAAATAGATAGCATTTAGTTTTTTTATCAAAAATATTAA
ATCTTGATTTTTTATCATCTAAGACAAGTTTGATAGCTTAAAATTGAACCAAGTGACATCGCATCACTGG
ATAAACAGAAAATATATAGTCACTTATAATTTAAAAATATATACAAATGATATGTCATTTATTTAATTTA
TATATATAATTATAAATATATGCATAGTCTGTCAGACCAGACATGTGTGTTTTTATAAACCATGCTATTT
TTAAAACTTTATAATGTATTAACATGATAGCTCCTCTAAAACCTTTGTAGTGAAGACAATTATTTTATGA
AGGTTATCATAAATTCTCAAAAATATTCTGGAGTTTTATATATTTAATTTTCACCAATACCTCAAACAAC
ATAAATAAAATTATAAAAGGATAACAAAACTAAATTAGTATTGATATCTAATTTTTCTTATGCAAAAGTT
TCATGAATAAGTCGTGATTAATGTTTTTTATCACGAGTTGCATCATTATCACATCAAAATGAAAAAAATA
GTCAATATAATTATAAAAGGGGTAACTTGTCTGATTAAATTTTAAATTTACTTTCTAAAGATTACTAGCT
CGAGTCCTATAAATTTTAAGATCACTGAAGACTTATATGGTCATTTATTTAAGGGCTTGTGAGATTAGTC
GAATTACATGCCAGCTAAAATAATCAATGTTTTTATTATTTTTATTAATAATAATAAAAAAAGCAATCTA
TATGTTAAAATTCTAAAAAGAGAACATCAACGACATGAACAAATAAATTAAACTAAATAAAAAATGTTTG
AATATCAATAATGAAAGGCAGTAAATGTGAGCCGGGCTTGTACGGCCTTGGGTTGGATCTAAACCATCAC
CAAACAGGCCTGGTCATCTCCACACAGCCTTAATAATTATAGGGTTTATAAAGAAAATATGTCTAGGGTT
TTGGGGCAACCCTGAAACACAGAGAGCAGACTAGAGAGACGGCTGCCACAAACC
Sequence ID: 120
Sequence Length: 3014
Sequence Type: DNA
Organism: Poplar sp.
CTAGTACAAAGAGTAAAGCCTTAAGATTATAGATCCAAAGTTTGTAGATATGTATAATAGACTAGTGAGC
AGAAATATTTAATTTATCGTCACAAAGGCATGTTAAATAAAAGATGGCGGATAAAAGCCTAGAGTTTATA
CATATTTAAAACTATAGGGATGTAAAAGCATAACTAAAAACAAATGTGCTTTCAACACAAAAATAATAAT
ATAACTTTAGCATGCATACTAAGCATATATTCAAACTTGTAATATATATAAGACCGAAGTCCTAACATGC
ATACTAATAATAAAAATAATAATTTTTAAATTAAAATAAAAATGGTACTTACTTGTTAAAACACCTTAAA
TTAATGAATCTTTTATTGTTGTCAATGATGAATCATTTGTCCTTAAGGCTTTATTGTTCTTCACTTGTGC
AACTAGAATGTTTGCAATATGTCTTCCAAGATTCCAACAACATTATATTGGTTTAAAAGCACTTCTAAAC
AAGGTCTTCGAACCAAAGATTATGTAACTTAATATCTCTCAACAAGATGAACCTAAGCGCTAGATTTTAG
AGAAAAAAAAGCATAAAAAGGAATAAAAACACTAAAAATGAGGTAAGAAAAAGTGTGGAAAAATATAAAA
AATACAAGTTAAAAACTCTTTCTTTATCCTTTTTTTATAGTGAATTTTGAAAGTTAAAATATTAAAGAAT
TAATTATTGATGGATCGATGTATTTCATACTGAAAACCTTTTTTTTTCTCATAAAACCCATGACTAGAAG
GGACCAAGAGAAATAAGATCCATTATATAAGCTCACAGAGCCCAAAGCCGTGTAGCAAGAAGGTCTGGCA
AAATGCCAGGCCCAACACCCATTAGGCATAAGTCGCACGACTCCTTTGGGTCTGGCGAGATATCAGACCT
AACCCTTTAGGCCCGGCTACGCACTGTGCTCAAGCGCCTGCGGGTCTAGCGAGATGTTAGACCCAACCTC
ATTGGGCTCAACTACACCCCCGGTCCAAGCTCTTGTGGGTTTATAGAGATTTCAGACCCAACCCCCCTGG
GCTTGGATATGTACTAGAGCCAAGATGCTAGAATTAACACCTTTTTAAGCCAATAATTCCTCCGAATATG
AGCACCTAAGGTGAGAATCTAGGGTCCTCATCTCCTTCCACATTTTCTATGCAAAAATTCCTCTAAGGGT
AATCCATACGTCAATCAGTATTAATATTAATTAAAGGGTTGATCCCATCAATATTAATATTGTGTACATA
TTGATATATGATCGTTTTTTATAGACACGTGATACTCCCATCAATAATTAATGTAACGTAAGGAGATACT
TACAATCAATATTAATGTTAACTGTAAGGGTCTTCCCTCCCCCACTTGGATATGAAGAAGGAAAAGATTT
GAGTAAGAAAAAAGAAAATTCAAGGTTATGAATATTCTCTGAACGACTTAGAAAAGAGGTTTGTCATCTT
CACTCTTTTAGAACTTATTCTTAGCATTTATCATACATAAACTAAGAACATATTTTTTTGTTCTTAGAAT
TTAATGCTTATTTATTACAACTCCTCGTAATAAAGTTACTGACTTAATCATCAGAGGGTCTCTAAAATCC
TTAAAAGATACTGTTTTATAGGAAATCCAGCCATTGTCACCAACCCCTGAAATCCTCAGTTACAGAGAAT
AGAAGATGAACATAAACACGTGATCATTCATCATCCAAACACGGTGAAAAATAGGTTCTTGACATTCTAG
ATTTTAGACCCATAATTTATTTATTTAAAACAAGTTTCCAACATCTTCATTGCAATCCCGGGTATAGTAA
ACATGAGTTCTGTTCCTCGTATCGAAAACGGCATGACCAAAACTGGCCTCACGATTTGCTGAGTGATATG
GCCGTGGACGTGCCAAGCTGCATCACCAGATCAATACATTACATTTAACAGGCATATATCTATATGAATC
TTGATTTATATTTGTTGGTTCAATCGAGGAATTTGCATAGGAAGAAAAGCCTAAAAGAAAAGGAAAAAAA
TCAATGATCTATTTACTTGTTTACCAGGCCTCCGAGATGCCCTCCATCACTAATGGACAATGGCGGTGTA
ACACAGGAGCCGATTGATTCTTTTTTTACAGAGCAATCTCCGTTTGTAATGTTGTATGCAATGTCGAACA
AAAACAGGCTCCAAGCTACTGCCATGGACTCCCCTTCCGCGTAGCGAGAGCATATTACCTTCCACAGAAT
GCTACGAGCAAAACAACATTCAGCCATGGCGTCTATAAACTTTGGTACGTAGCTCCTTGTCAAGCCTTTG
TGTGTTGTTAATGCTTTTTTAAAATTAATTTTTAATTAAAATTAAGAAAAAAGGTTTTCATAAGAAGTTA
TAGCAAAGGAGCCCAAAGACAACATGTAAGCAAACATTCAGCCCAGCCCACTAAAACTTTCCCCTGTACT
AATGGGCCTCTGTAGCCCATTTTCACACACTTTCCAACAAGTAGCAGAAACAGAAATAACTTCCCAGTCG
GAAACCGCCAGTCCAAGAAGAAGAACCTACCATTCAAAAGTCAAACGGTTCACCTCTACCACGTGTCCTT
CTCCTATTGCCTCTTCCTTTCCTTTCTCCCAAAGCAACAAAAGGCCCATACCCACCGTTACGACTGTTAG
ATAAGCTCCACCCACCCCCTATTTTACTACCATTCATGGTCCTTAAAGTTTCGACTCCTGGCGACATTAA
GCCCTTTACTTTATAGAGGAGCCTTCTCTATGACTTTCTAGAATCTAGGTGATTTCTTGTGGGAAAATAA
CCTAAGGAAGAGAGACAAATTGGACTAAATAATAAAAATTTATTCTTGAAGGATGATATATGTAATTATA
GGTATAAATAACCACGCAATCCATTCGTATATTTATACCTATAATAAATAATGATAATAATAATAATAAA
AAAAAAAAAAACGAAAACGAATCTTTTTTCTATATAAAATCTCTCTCTCGGTGAGTGTTTGCCCTCATTT
AACA
Sequence ID: 121
Sequence Length: 3020
Sequence Type: DNA
Organism: Poplar sp.
TTCGTTATATTTCATCAATTTAACCTTGGAAGGATTGGATTTTAAACAATTTAGTCTACTATACAAGGTA
TGTTCATCACGGTGTATTAAAAATCCGGTTTGATTTGGTTGATTTGATGAAATATGACGAATATAAGACA
AGATTGATGAATTGTTTATTGAAGGGCCTGATCTGCTGAATTGAAACAAATACAGGGACTAAACTGTGTA
TTTTCATTTGAGATAATCTTATTTCCACTCTCATTTATGGCTTGTGGTCCACACGCAGAACCAAGGGCAG
AGAAGGCACACAGAATGGACAGCCACTAGCGTGAATTGGTGAAAAAAGGTGCGCCGGCAGTGGACCAGCA
TGGTCCGTTGACTTCCTGACGTTAAAACGACTGGACTACGTTCATCAGACTCCTCCATGCCACGAATACC
ACCCCACCTAGCCAGTGCTTACTGCCTTCTTTATGCCTACCTCTCTCGAGTTTTTTTTTTTAAAAAATTA
ATCATTTAAATATTTTTTTTTTGAAAAAATAGCACAGTGTATAGAATATACAGATAACTATGACAGTTTA
GTTCAGAGAGTAGCAATCGAATTTCTCAAATTGTAAAATGATCTTATATAATTTATAATAAATAAAAAAA
TATCTAACTCCAATGATGATATTATCAATATTATTAAAAAAAACTTCAATGATATAAATTTAATAACGTT
AAAAATATTTAAAAAAATCATTAATGATGGAGAAAGAAAATTATATGTATTATTCAAAGCTAGTAAAATT
TATTTACTTTTAAGTAATTAATGTGGTCCATTTTAATCATTATCGATAATTTTTTTTTATATTATTAAAT
TTATTTTATCAAAATCTTTATAATAATTAATACCAGAATCATCATGATCGGAACTTCTTATTCCTTTTTC
TCCGTGAAGCCAACTTTACTCTCTATGACAGTATCATGTTTATGTACGGGCTCTCAACGTTTTAAACGAT
GAAAGGACAAGCCAATTATTCCTTCCTCTTCAAAATCTGTTTCTTTGTCGAATGTTTCCCATGTAAGAAA
CGTAACATGTATAACCGATATATAAGTTAGCAACTAAGACACATAATTAAAACCAGTGGTGCACGTTTGG
TAAAACCCACCGAATAAACGTAAGCCCTTCAAAAATTGTCTCAACCCCTGTTCGGAGAAAACCAAGAACA
TGAAGCTTTTGGGTTTTAAAACAGCTCGTGAATATACACATATCATGACATAAAAATGTTCACAGAGACT
TGTGCAATAGCGTTTTTTATTCTTCTTCTACTTTTGTGCAGTACTGAGAAACAACAGCGAGCTTCAAGTT
GCGGGAGCAAAAGTAAACAAAAATAACTATGACCATACATTATTATACCATACCAGTACTACGTACGTAC
AGGCTACATTATTAGGAGGGGAGTGAATACATAGAGTACTGTGCACGGGGAGCATGGTAACCTGGAGGAA
CTTGGAAAACATGACTATGGAGAGCCATATCAACGCCCTTTTTCACTGCCCTAATGAAACTGCTTGTTTT
GCCTCCGCTACACGGCAATGCCATATCCTAAACTAGAAGAAACAATGAAGAAGAAGAAGAAGAGCCCGGT
ACACCCATCTTGGTCTGCTTCCCTCGCTTCACCACTTTAATTTATTAGAGCCCAGTAACCATTTTTAGCT
CATTAGGCTGCATTTCTGCTGTTCTTAAATATATCTTATCAGCCCTTTTATTGTAATCTAAACCAAAGGC
CCAACAGCCATACCGAGCTCTTCGAGGTTCAGGCCGCGCATTTCGGATGTTCATAAAAACTTTGGCCCTG
ACACTGTAATCCAGAGTAAGTCCCCAAGGTTCTAAACCCAGTGAACAATTTAACTATATTAAGTAACATG
TGATTTGAGTAAAGTATTACTAAATTCCAGCACCATACTCTTTTGATGATGTCTCATGCAGTAAATGCAA
TAGCTCCTCGTATTGTTTCAAGCTTGAGTCTAGAGAAAGTTCAATTTTTTTTTTATTGTAAATACAGGTG
TGGGTATTTTATCTTAGTTCTTGATCAAGAATTAAACATAATTAGAGTAGACCAAGGTTGATGTCATTAT
ACATCAACTAAACAAATCTTAAAGGCTAATCGATAATTAACAAGGATTATCCTATTTCATAATTCAATCA
ATTTAAACTTGGAGGCCAGCATTTATGAACAATTAAGAATATTTACATACAAAAAAGCTTAACCTTGATT
GAAATTAAAATACATCCACGAGTACCTTTATTGTAAAAAACAAAATTATATAAAACACGTGTAAACAAAA
CCCAGCCCAGCCCATATCAGCGACTTTCCTGGGCCAAAAGCCCATTCCCAAACTCCACGACAAACACACT
TTTTATACCCAAATATATCCAGGACGTAACTGAAGAAACATAGATTAGCTTCCCACCAAAAAGCCGAACC
TACCATTCAATCCAGCACTCCACTGCTACCACGTGTCCTTCTGCTATTGCCCATCCGCTGCCCTTTCTCC
TTAAGCAAACTCAAAAGGCAAAACCCACGCTACCGTCTGTTAGCTTTAAAGCACCGCCCATCTCCCTCTC
TACGTATATTAGTACAATCGTATTTAGTATTTATACCATATGATTTGGAACCAAAACCATCCATGGTCCT
TAAAGTTTCAATATATACCCATGGATCAAAATAATTCAATAATAAAAGAGGTAAAATCAAGAACTGGCCC
AATCCATCGCCGATCTTACTCCTTTAAAGTCTCAATAAATTAACTACAATTATCCGCCGTAGGGCCCACC
CTATAAAATTAAAAGTAGAGGGTCGAATTTGATCTAATCTAAACTAGAGACACGGATATTGATACACGAG
GGATGATATAATGAATCCACGTAATCTGTATCCCAATCCGTATCGGATTCGTATATTATACGTCTAACAA
TAACCAACAAACAAGTATATTTTTCTATAAAAACCTCTCCTTTGCCAAGGCATCGCCATTACCTGATTTT
CAATCCAACA
Sequence ID: 122
Sequence Length: 3038
Sequence Type: DNA
Organism: Poplar sp.
ACTTAAACTTATTATGAAATTGTTTACACGAGTATTTATTCAAGTGTGTCCGCAAATTACTAGTGTTACA
AGTCTTTGAAGCACATGCATAATTTTATTAATAGTACTCGATCGCATGTAGCTCTCCTCGACAATGGATC
GTAATCCTCTCTATATATTATATCAAATTGATGCTAAACTTCAGATATAAATATAATTATAAAGGCCACG
TTCCTTTTCATGTTACCTTTTCTGGGCAATAACACTTGCATGAGTAGCTGAAACAAGCCTGGTCTCTATT
CTAGCATCATCATCATTTGTTGAAGGTCGAACTTCGTCATTCGATGGATGAGCACTTCGTTGATCAACAT
TAATTTCTTGAATGGAATTGAAGAACTTGTATTCTTCATCCTGAACAATAAGATTTAATCAATTTTAGTT
AAATATTTATACAAAAAAAGACGTAATAATTACTAGTTCGGAGCTAAGTCTAAGCTTATTAATTTTGCAG
AAAATGCAAAAAGAAAAAAAAAAAGAGCAGTCAAACAACAAAACTGAGATTGACCAGAGTATTGTGAAGG
TTAACTTGTCAAAATCAAGCTAGGGTTTCTGGTCATGTAAATCTCTAGCTAACTTCAAAGCTTTTGCTGC
TTCACAATGGACGAGGATGGGACACATGCACACACAACTTTACGCCGTAATCTCGTGGATCCATGCCTTT
GTTTTGTGGATGTAGCATGAAATATATTTTCAAGACGATAACGTTTTTGTTAGTGGTGATTAATTTTTTT
TCGGTTTAGTTTTTATAAAAAAAAAAAATTAAACTAAAATTTTTTTAAAAAAACTAAAACCGAACCGAAA
TCGGGTCAAACCGACCGGTTTCGGTTCAGTTCTATTTTTTTAGGGTAGAAACCGGTTTGACTCGGTTTTT
TCCGGTTTTGGCTTGGTTTTTTCGGTTTAGCTCAGTTTTGGCTTGGTTTTTCCGGTTTGGCTCAATTTTT
TTTGAGTTTTGGTTTTTTCATATATTTTTTTTCAATTTTCTCGGTTTTTTAGTTTTTTTGCTCACTTGTA
GTTTATGTGTGAGAGTTCTCTTTGTATTTTCATTTTTATTATTGTGAATACAAATCTGAAATACATACAA
ATTTAACTATCCCAAACAATCGGCGAAGACGGATCTATAACAAGTGCAAATGGGGCCGCCCAAAACTGAG
AACAATTCATAAAGCTTGATGGATTTTTTGTTCTCTCCGCAAACATGTTGGAGTTTATCTAATTCCAAAG
AGATAATGAGTAAATTAAATGATGAACATTGTAATCATAAAAAGAAGAAGAAGGAAAGATATAATTATAA
ATAAACTTCCCAGCATAATCATTGATATTGATTTGGTAGTTAATTAAGAAAATATTTCTTGACTTTTTAA
AATTAAATCTCTTCTAAACCATTGTATAATCTGAGGGTGTGTTATATATTAAAATCATCTTATTCTGGTT
AATATAAAATGATCCGAAAATACTTTTATAGTAAAAAAAATTGTTAAAATTTTGCAATATCTTGATTCAA
CCATGTATAACAAAACATGATTACAATTTTTGCTTGATCTTTCCTTGAATTGCTCTGGTTGGATAACATT
AATTTCGTGTTTTGAAATTCTCAATAGCATCTCTAGAACATGGATTCACGGTGACAAAAAAATAAAAAAA
TCAAAATTGAAACCTGGAAAAAATATTACAATCACATGAATTCACCAGCAACGACAACACAAGAAGGGAA
CCGGTAACTTGTTAGCGGCTGTTTGACAAACATACTTGTCCATGTATTTAAGTATGTTTTAAGAGTAATC
TATATTAAAAAGCATTAAATTAATATATATTTTTAGTGTTTTTTAATAGTTTTGATGCTGATAATAAAAT
AAAAATATATAAAATAATATTTTAATATATTTTTAAATAAAAAAATATTTATAAAAAACAACATCATAGT
ATCAAACAGATATTAATATCAAACAAACATTTTATTTTTTTTGGTGTGTTTGAGATTAAGGTGCGGTTTG
ATTTTTGTAGAAGAACTCATAAAAAAAAAAAAAAAACATGTATTTCTAACTTTTAGGAAGATATAATTTA
TACTTTAAATGATTGTACTTACAAAAGAAATTAATCACACTCCACCATATCTCAATTTCAAAAATATACT
TGGGCAATGTTTGATATTAGTTATTTTTTAAAATATTTATTATTTAAAAATATATTAAAATAATATTTTT
TTATTTTTAAAATTTTACTTTTAATATTAATACACCATATCAATTAAAAAATATAAAAAATTATTATTTT
TTAAAAACAAGCACAAACTTTCCTTCTTCCCCTTTCTCTACTAGAATCGTCACAGCTTACGTATGTTTCC
CTGACCCTAATAAATAATAATAAATATCTTTGAAAATTAGTAAATAAATATTAATAACGGTCACTATTGC
GGGCCCAAGCACGAAAAAGACAAGCATCAAAGAAACACAAGCAACAGAATCAAAGGCCCACTCAGTCCGA
GACCATGGAGTGCACGCTTATTTGGAAAACTCAATTAGCCGAGCATTAATAACGATCACCTTCACTTCAC
AAAAGCCAAAAAGTCAATTTATTACGATGGAGAGGATTGTGATCGAGGCAAGGATGGCGTAGCTCCTATT
TTTAAATATTTTAAAAAATATATTCGATTTCAAAATTATTTTCTAGTATATCAAAATAATCTTAAACTAT
ATATAAAAAATAATCTTAAACATTTTTTTAAAATTTTTTCAGTAAACACCATTCAAACGGCGCCTAACCA
ATATATATATATATATATATATATATATATATATATATATATATATATATATATATTTATTTATTTATTT
ATTTATTTTTTCTTTCTGTTTCTTAATCCATCAACTTGCTCACGTAACTATACGTGTCACGTTCACAGTG
GTAATCACCACACAATATTCTGGGAACATCGCCGCTTACAAATATCTCCTACGCTTCCAGTTCCCACTGC
ACAGGCATTTCTGTCCCAAGTCCAAACC
Sequence ID: 123
Sequence Length: 1129
Sequence Type: DNA
Organism: Poplar sp.
AGACAATGATGTGCAAATAAATTTGATGTACTGCTCGAGCGAAAGCCTCGGAGGCGAAATTAAGGTTGTGTGAT
GGATATTTCACAAGGAGCATTGTACTAATTTCATCAACTCCACTCATTACTATGCTTCGAATTTGTAGATAGAT
GCGAATCAATGTCACAAACTATAAACCCAATGAACCTTATAAGAGGACACGTTTTTTCTTCTCCATATAACATG
GAGCCATGTGCCTTTCTATTTCTTCAAGTACACTTCACAAGTGTTCTGTGGCCTAGTATTTCACGAACCGCATC
GCTCTTTCTTTAGCGCTTCAATCATCAATGGCTGCAAATTTATACTTTCTTTAATTACCATCATGGTTATAAAA
TTCAATGCAGAAGGATTCTATCGATGTGACACTTAGGTTATAGATCATAGGGTTAATAAATCTTTTTTTTTTAA
ATAATAAATTAAAATGAGATATTCTTGATTAATTCTATACTGAATTTTTAATTGAATCAAACTGAGTTAATATT
CTATATTATGAGTTGCGCAAATCTAAAACGACTGTAGGGCTGGTCCATATTTTAGAACTGGACTGTATCTAAGG
CAAACCAAAGAACGAATTAATACAAATATAATTCCCCCCAAAACTTGAGACTACAAAAAATGGGGTCCAAAACA
TTATAACGTGACTTGGTAAGAATGGGGTCCAAAAGGTGACCCAAAATGAAATAAAAAATTCGGGAGAAAAAAGG
GAAGAAATAAAGAAGACCGGAAATAACCGTTGTGGGCTTGACTTTGGGTTGATGCCAGGCTGACCCCTTGAGTC
CTACCCTACACGATAGCTAACCCCTCACCCATAGAAAAGAGAAGATGATTAGCCATCACATGGCCTATCTGCAC
ACCTGGTCCCACCCCCATTTTCTCTCTCTAGGCTCTCCCAGGTACAACAGCAAAACCCTAAAATACCCCTGTCT
TATCCAAGATATGCAACCCACCTCTCCCTGCTTTAAAATGACTGACCACCTAGGGCACTTACAGAGACACCGTC
GCAAACCAGTAGCTAGAGAGATAGAGAGAGGAGGAAAGGCTTGTGGCAAGAGAGCTAATTAACTGTAAAGACAG
AGAAACTCCTTAGATCAAA
Sequence ID: 124
Sequence Length: 3102
Sequence Type: DNA
Organism: Poplar sp.
TGATGCTTGGTTTGTGCTTTTGTAACAACTGCCCATGTATAAAATCAATCTGTTGTTCATGTATTAATTATCCC
ACGAATCAATCGGCTGGTGGTGGCCGGATTATGCATGATGTCATCGCAAAATCAAATCTTGCTTTTGATATTGC
AAGAACCACCGTAGCAAACCACATTTATGATGATACCAGGCTAATCAAAACTCTCTCTCTCTTCCTCGTTGCTT
TCGTTGGCTACGTGGGCAACAAGCTAACTGGCTGGCTGGGCCACAGAAATGCCACCATTATATTTCAAAAAAAT
TAAAAATGAAGCGACCGTTGGGGGCGTCGGGATCTTGAGAAGGGTAGACAAGTCCCTCTCCTTCACATTCCCCA
ACGGCTATAAGATTGTAAGAAGGCTCTGGAACAATCTAGCCGTTTTGGGATACCGGACACGTGTCGTGGCTAGA
ATGGTGATGATATGTACAAGTGAATTGAGTCGTTTGATACAAAATGTCTGGTCCTTTTCTTTTGTTTGGCATTT
ATTTATTATTCAATAGAATATTACGTTAGCATTTTATTTTCCCAACTAAATAAATGTTCGGGACAGTTAATGGT
GTGTGTTTAAGGCGATGTTGTAAACTCGGAATGTTCTTGTAGGCTGACTCGTGGTCAAAATTGATCTGGTTAAA
ATAATAATAATAAAAAAAAATCTTGACTGGCTTAATTAAAAAACTAGATTAACTTACTAATTCCATCAAAAAAA
AAAATTTTATTAAGATAGTGACTTGAGTTTGTGTTTCCTAATAAAATCAAATCATATCTCACATAAAAAGAATT
AATTTAAATTGACTCGAGTTAACTCATTTAAAAAAAAATCAAATAAAATTATTTTTATAAAAAAAATCAATAAA
TTTTTAATCAGGTTTTATCCAAATCACAAGTCAATTCAGGTTTTTTATTAAGTTAAACTAAGCTAATATTTTCT
ATTTTTTCTTCGGCCCCGGACTGGTCTAAACAGGTTTTTCAACATGGGAGTTACATCACAAGATTAAATGTACA
TTTCAAATTATTATGACTCAGTGAAATCAAAATGAAGCGAGGGAGGGAGGGAGGGAGGAGATAAGACTGCATTC
CGGCGAGTGCTTGTGATGGCGTCATTTAAAATACTGCCTTTGATAGGTAAGGAGAGGCCCATCAAAAACACCAC
TACCCACAGCAAAGCCACTTCGGCAATCATTCTACCTCATAAAGGACTTATCTTTTTATCCTCTCTTTTCCTTT
TGGATTAATAAATAATGAAAAGAAACACCCTTCTTCTACAATTTACACGTACTGATTGCACTAAGCATTTGTTT
TGTTTTTAGAAAATGACATTAGGCTTTTTTTGTTTGGTAAACTTAGTCATGGAATATCAAAAATTATATGAAAA
TACCTATAAAACAAAAAAGATTAAGCATATTTTTATCAAAATTATTCAAATAACGGTGCACATACCCTAGGAAA
CTTTACTTTTTTTATCATACGAAAAAAAATTATACTTTTATTGCATGTAGAATTTTATTATCATGTCATTTTTT
TCGACATTGCAGTATTCCTGAAATTTAAATTGGGACTTTATTTATTATTGTGACCATGATTGTTTTTAAATGTA
TTTTTTATTTGAAAATATATCAAAATAATTTTTTTATTTGTTTTTAAATATATTTTTAATATCAACGTATCAAA
ACGATATGAATACATAAAAAAATTAATTTAAAGTAAAAAAAATAAAATAAATTTTGTTTTAAAACCGTTTTTAA
AACAGAACAAACGAGATCGAAGTCATTCTTCACATATAAGATTTGAGACAAATCATTTATACATGGACTGGCTT
GTTCACATGGTTTTTTTCCACAACCTCTACTTGAATCCAAATTTGAGACAAAAGACGTGAAACCAACTACTCTT
TACCATAGATAGAGCCTTCAGAATTGAAGGGTTGTGTAATTGATACTTGATCGATGATTAACGTTGTTCTAATT
TCATTACCTATTTTTCTAACCCAAGCATCATTGTCGTTCAAATATTTGTATAGATGGGAATTATTGTCACAAAT
ATAACCCTAATGGATCATAAAAGAGGACTCGTTTGTTCTTCTCCATATACTATGGAGCCATGTTCCTTCCTGCA
TTTCAAGCACGTTCATGGCAGAAATTAATGCTGATGGGGCGCCTAATGTGTTCATGGACTGCATTTCACACTTT
CATAGCATTTCTATGGCAGCAAATCTATAACCATTTGAGGCAAAGACATACTCTAATTCTCACTACCGAACTAA
TTAACTACACCCAATGCAAAATAAACAACGAACCAATACAAATATAAGTTCGGTTTGGTTTCATAGATTGATCC
GAAAGATTTAGTATCCTAAAACTTAATCTGGGTTAGGTTTTTAATTGACGTAATCAAGTTATTAGTAACACACG
GTTAAGACAGTTAAATCTGGTTAAATCAACATCAAGAAAAACCTTATAATTAATTCAATGATATGGGATTTAAT
CTGATAGCCTAACAATCATTTTTCCTTTCAAATCAGCCCTCCAATCGTGTACAATAATCATGTCCAAAACATTA
TACCGTGACTGTGTAAGAACTGGGTCCAGAAGGGTGTGCGAAATGAAGACAAGCTGGGGACTGGAGAAAAATAA
AACGAAAATAAGAGTTTCAAGTTCGAGAGAAAAAGCAAGGAACGAAAGAGGACAAGAGATGACCGTTGGTCGCG
TGGCTTTGGTTGGATGCCAGGCTGACCCATTGAGTCCCCATAGCTAAACCTTCTCACCCTGTATAAAAAAGGAG
ATGATGAGCCATCACATGGCCTATCTGTACAACTGGTCCCACCCCTGTTTCCTCTCTCTACAACCCATCCTCTC
TGTCTCTCTACCCTCTCCTAGGTCCAGCAGCAAACATTGTTTTGTTCCCAAAAGGCCCCTGTCTTATCCAGAAC
ACGCAACATTTTCATACCCTTCTCTTCCTTCTTTAAAAGGACTGACCACCTTAGGCCACTCACACAGTTACAAG
CCGAGAGAGACGCAAAAGCTTGTGACAAGAGAATTAATTGTACCGAGAAAGATCTTTAGATCAAAAAA
Sequence ID: 125
Sequence Length: 2221
Sequence Type: DNA
Organism: Poplar sp.
CAATTCTAATTAGGTAGATGGAAAAACAACGTTGTTAAATGAAAAAACATGCTGATTTCTAGTCTTCCCC
AAGCCATCTTTAGCGTTGGTTTTCACCATTAAATCAGCCCCCAATCAAACTGAAATCTCATGATCATAGT
CCTGTTTTATTCCTATAAAAAAAACAAAGATCGAGAGTCTAAAGACAAGTAAGTAGAAGGTCTCAGCAGC
GAAGGAGACAATTAAGATGCAAGGATCATGGCATGCATATCTTAACCTGCATATCATGTCTACAAATATT
GCATTTTCTACTTACGAAGATCATTGGACACAATTGCGAGTAATCGAGGAAGAAGAAGAAATAATTTGGG
GGAAGAAATGCAAAGAAGAAGAATGTGAATAGAGGAATTCATGGGCACAAGTCCCTAGACAACCCCACTA
TTCCAATTGATTCCGCATGCTCTGGCAGTCCCTAGACAACCCACAATCACCTTGCACGGTCCATCTCAGC
CGACATCAAGATGCGGTAAAATAAAACTCATATATATCAACTAAAAGAACTAAAAAAATTGAAAGCTCAT
TAAAGTTTTATATTATAGGTTTTTAATTTTTAAAAATTATTTTTATAATTAATATATCAAAATAATATAA
AAACAATTAATTTTTAATAAAAAAAATTAAATTTTTAAAAAAACGCGGCGCAACGCGTTTTCAAAACGCT
CACGAAGGACACACACTGAACACTCTCCTTTCATTATTATCTGTCTTTTTTCTGACACACTCTTTCACTT
ATTCTTCTTTCTTCTCACTCGCTGCCCACCACACGAAATGAAGGAACCACACACACACCCACACATGGCT
TTGCGATGTCGGTAGGAGAAATTTCCAGCTTACATTATTTGTTACGTGTCTTGTCTTTGTGCTGGTAGTT
TTTTTAAAGTGTTTTTTATTTTAAAATAATATTTTTTATTTTTTAAAAATTATTTTAACATCATATTAAA
ATGATTTTTAAATATAAAAAAATAAAACAAATTTATATTTTTTAAAAAATATTTTTAAAACCTAATAATA
AACACACCACCGGCCATAATTGAGCTAAGATATTTTCTAGTGGAATTATGGACAAATATTTCTACATAAT
CCAAAGATGGCAGGCGGTGATAAAATTCTGGATTGATCTTCAATAGATTTCACACCTAAGATGATCAAAG
CAACCTTTCTTTGTAACCTAATTGGGATTTACATTTTAGATAATAAATTAATTGACAAACAATCAGTTCT
TAGTTAAAGCAAGTGTATGTGTCTGTTTGGTGTCGAGTTGGAACAACGGTTTTTTATCCATTTTAAAAAT
ATATTTGACTTGAAAAAATATTAAATTAATATTTTTTTTATTTTTTTTATAATTTTTACATGTTGATGTT
GCAAATAAAAAAAACTTTAAAAAATTATTACTTTAATTATTTTGGCAAACAAACAAAGATCATAAAAAGA
CTCGTTTTCCTACTCTTTTCTTATATTTTAGAGTTTAGGTTTGTTTCTTGTAAATACATTCTTTTAGTTT
TATTTTAAAGATATTATATGATTAATTAATATACATACTAAAATTTTATTTAGATATCAATTATAAGTTT
AATATATATTCAATTTGAACATGCTTGCTAGAATCTATGTATATATAATTTTTTTTTTATCATGATATAA
GTCAAGCTTGTTTGGCAGTGTGGTTGCGGTTGCTTTTCAAATAGCTTTTCGTGTTAAAATGCATGTCAAT
GATATTTTTTTTTATTTTTAAAAAATTATTTTTAACATCAGCACATCAAAATGATATGAAAATACTAAAA
ATATATTAATTTAAAGTTAATAAAAAATGAATTTTTTTTTAAACGCAGAAACAAGCAGATCAAAATATTT
AAATTATAAAATAAACATGTTTTCTTCTCAATCATTGTCATAAGATTTGGACAACATTGTATGTATAAAA
TGTGGGTGTCTTGGGCTCAAGATCTTGGATCCCTCAATCATGATCCTTTCTCAATTGAATCTGTTAAAAA
ATAACCGAAATAATTTATTATTATTATTTTTAACAAACGAAGAAAACTAGCACATGAATTATTCACAACC
CCCCTGGTCGAAGGGCCCCATTATCTCAACCTCAATAACAGATATTATTCCGAGCCATCTATAGCTTGAC
ACGTGTCATTGCACGTGTCAGCAATGGATTGGTTTAAACCAGTATAAATAA
Sequence ID: 126
Sequence Length: 3095
Sequence Type: DNA
Organism: Poplar sp.
GAGGGGAAACTGCCGGGGGTCCTTGAGGTCTAATCCTCTTGCCCCTTGCCCCTTGAATCTGTGATGTTGT
CCTGCTTCTTCAGAGAACAGGGGAATGGCGAGAGAGAACCGAGAGAGAACAGGGGAAGAGAAAGAGAGCC
GAGAGAGAACAGCCACGAGAGAACTGGGTATGCAGGAGGGGAAACCGAATGAGGGGAAATCCAGGGGAAT
GAGGGGAATGATAGGGGAATTTGAGAAACCAAATGAGAGGAATGACAGGGGAATGAGGGGAAACCAAATG
ACAGTGGAATGAGAGGGGAATGAGGGGAAATCGAATGAACTGGGGAATGATAGGGGAAATGAGGGGAAAC
CGAATGAGGGGAAACCGAATGAGGGGAATGACAGGGGAATGACAGTGGAATGAGGAGAATTTATGAGAAA
CCGGAATGAGAGGGGAATGACAGTGGAATGAGAGAATTCTTCATACAAAAAAAAAAAACCCAAATATATA
ACTCTTACCATAAACTAATTTGGCTTTCTTCATATAAAAAAAAACTTATTTTAAGCTTTTAAAATTGAAA
AAAAATATATTAATAGGTTTAACTTGAAAAATATTTCACAAGCTTATTTCTCTATAATATGATATGACAT
ATATAGTTATATTTTATAAAATAAGCTATGTAAGAATATAAGATATTATAAAAAAAATTCATCATTATAC
TTTTTAGATTTCATTCTTTTATTGCAAGTGATTAAATATTTATATTAAATATTTTATATATATTAGATAA
ACTTGAACAAAAAATTAATTCATTAATAAATTATTTTCCAGTTCATTTTCCATAACATAACCAAACACTG
GAAAGTGTTTTCCAGTTTATTTTTCATAATACTACCAAACATCAGAAAATACTTTTCCGGAATTCACTTT
CCAAAAGAAAACAACTTTCCTGCAAACAAACAGAGCATAAGAATAGAAATTGAAATTACTAAATATTTAA
AAAGATAGTAGTGAAAAAAAATAATTTGCTTTTTTTTGTTTTTTCCCCTTATGCACCTCTTTTTTTTAAA
GCTCTCTCATCAAGAGAGAATTGCCATCCAGATAGAGAGAAAAAGATACTATTCTAAAAATAACTCAAAT
AATTTTTTGAGTTACTTTAATGCCTTGCAACTGGAAGAAGACATGATGACACGAATCATCACACGTACCC
ATTATAGGCAAAGGCTGGATTACATCTTGGTCCTCAAAGTCTATTATTGTGTGATAAGGTCCTACCAACC
AAAAAGAAATGCCTTCTTTTACTACCCTCTTGCCCTTAAAGTCTTGCTATTTTTACCAAAGTTTAAAAAT
ATGAAGATATTGACTTTTGCATTACTGAACCTAAAAGTTATTCATGCGAGGATTATAAGGTATGTAAAAC
AATATGGTTCAATTTTTATAGATGATGTGAGTAAATTAATGAATTATAGAGGACAATAGATGAGCCGCTC
GATAAAACTACAAGAGTTAGAGCATCCAATCCAAATATCCAAGAAAATAAAGTTATATGTATATATATAT
ACATATGCGTGTGTGTGAGAGAGAGAGTGAGAGAGAGAAAATTATTATTTCAACTAGATAACTTGACTCG
AAATTTTAAAAAATATTTTTATCTATATACTATGTTGATATTATATAGATAATACATTTATATTTGTCGA
TATTATAAAATAAGAATAGAAATGTTAGATATATCATCGATAGAAAAAAGCCAGAATTTTTGTTAATTAA
CACGAAAACTAAATGAAGTTAAAATATTTAATTGTTGAGGTCCTAAGAGAATATCCAATCTAATTGTTTT
TTTCTTTCAAATTGAGAAAACAATGAATCCAATGTATTTCTTTCATAACAATACAAGGATATTTGGAAGT
TACAATATTTATAAAACTTTTAATTTACAAACCCACACCAATTTTTGTAGGCGCATTAACTTTTATTTTA
AAAATACTACTCCGAGAAAATACTCATCAAAGACCCCTCAATAACTGAATTCCCAATAAAAAGGGACTAG
TTTGAGGTTTATGTAATCAAATTAACACTAATTAATATAATAAAAAAGAGATTATGATAAAACATGTAAG
ATAATTTTAATATGTAAAGCATATAAACCCAGTAAAAAATTAATATGATACATATCTCATGTTATTATTA
ATTAAGTGTTGAAGTAATTATCTAAATAAATCTTTATTTTGTAAAGAATAAAAAGTCTTCTATTCCATGT
CAAATTTTTAGGGTTATCTTATGTTGATGAAAAATATAGATTTTTTTTATTTACTTCTTTTTGGTTAGAC
TAAAAATTCTTTATATAAAAACTAACTTTTACATCTCTATATATCATAAATATACTTAATCCGCTGAATT
TATTCACCTCTAAACTTTAATTATCATTTAATTTAAAAACTAAATGACATATTAGCTCCCTTGAGGATAT
TTTCTAACAAAATTATTAAAATATTACAATGTTATATGCTAAAAATTACAAAATTTTTGAATAACACATG
CAATATAATAATTTAAATTATTATGAGTTTAACAATTCATTTGCACTTTTATATAAATAAATAAAAAGAT
GTTAATAAAATAGTATTTTGAGTCAGGATATAGAAAATATTATAATATTTTTTTACTAATATCTCGAGTT
AGACCAAATTTCAATTCATAAATTCAAATAAACAAACGTAATGTTTTTATTTCAATAATACACTTGACGA
GAAATATAGATTGCAGGGATAAATCTAAGAGAAAATGAAAAAGACGGACCACATTAGCAAACTGCAAGGA
CTGCAGGTACCAAACACATTATCACTAACCGACATAAGTGAAAAAGAGTGGAATATCATTAAATGGACGA
TTATGCCCTTGGTTTTTTTATGTTGCCCTAGACCCTTCGAGATGAAAGGCCAAGATGTAACATAGGTCGG
AATCAACGGCTCACAATCCTCATTCAGCCCTTTATATTTTTCTCTACCAGCCACAAAGCACCTCCTCTCT
TTCTCGCTCTCCAGGGTTTCTAGTCCAGGGTTTCTCAATCCTGCGAAAGAAAGAAAGAAGGAAAGAAGCT
GTTTCAAAGTTCAAA
Sequence ID: 127
Sequence Length: 3630
Sequence Type: DNA
Organism: Poplar sp.
TCTAGACCTTAAACCCTCAATAAGGGTAATCTTTTCTAAAAGCAATACCATGTAAATAAAACACAAGAGT
TCTAAAGAAGAAAATGTTTGTTGGAAACTTAAATGCTTAAGAAATAAAGAAAAATAGTGAAGAAAGCAAT
AAAGAAAATAAAAATGATAAAATCCTTGGGAGAAAAATGATATATTATAGGAATCTAAATATACTACAAT
GACCATTATTTGTAGTAATATCTAGCTTTATTTATGCTATTACAATGTTTGAGTCTTGTTTACATAAATA
ATTTTAATTCTATAAAAAAATTGGTATAAGATAAAGTAGTTTATTAAATCCTAATGCAAGTCAAACTATT
TTTTTATTAACACACACATTAATCTTAATTTAATCTTTAACTTTGAATATTGGTTGAAACCGCATTTTCC
AAAAATTTAAATTTATTTTGCTAAAATTATTTATTTTTTTGTTGTTAGATTGTTTTGATGTGCTGATGTT
AAAAATAATTTTAAAAAATTAAAAAATATTATTTTAATACATTTCTAAATAAAAAGCACTTTGAACCGCA
ACCGCTACCACATTTGTGAACACACCCTCAATATTCTTTATGCTTGGCATATGTATATTTACTTTAAGAA
TAAACACTCAATACTGAAATTGAGAGGTCCTTTTATAGAGTAATTAAAACTGCCTATAATTTATTAAAAT
TAATTTAATTGGTCCCTGTAGATTTTAAATAATTAAATATTTCCTTAACCAACAATGAAGATGTCTTCGT
CTATAGTCAATCCGATTTTCTATTAAATACATGTTAGTTTTTTATTGGTTAGAAGAATAATAAAAAATTG
TTAAAATCTCAAAAACAAGTATTAAGAAATTTAACACATAAGTGTTAATTTTTCTTACCAACTTTTTAAT
TTATTTATAAATTTAAATGTTTTTGAATTTTTCCCTTTATTCTAAAGAGAAAACATAAATTAAAGAATGG
TTGAAAAACTTATTGTTAATTTTTTATTAATATATGTTGTATTTGTTATTATTTTTTATAATTTTTATTT
TTTTAGCTAACTATCTATTTATTTACCATAGAAAAGTGTCTTTTCTTTATTTAATTTATTTTATTAAATA
AGTGTTGCTTTATTTTTTTACTTCATTAATGATATTTTGTATTTGTTGTTATTTCTTAAAATTCTTTATT
TTTTAGCTAACTGTCTATTTATTTATCATAAAAAGTGTCTTTTATTATATTTTTATTTTTTTAAAAAAAA
ATAAGTAGTTATTTTTTACTTCATTAATGAAGGATAAAATTATGTATTTATTGATTAAACATATATGATT
CAATTTTGTGTATTTTTTTCATAGGCATGATCTTTCAATTTAATTTTGCATGAAAGTTTTGATTTCATGT
TTAAGGTTTTATAATCTTTACATAAAAAGTTTTTCTAGAAGTTTTCTTTTGATTTAAAAAATAAAAAAAA
ATTCAACTATAAAAAAAATAATCTAGCATAAATTAATAAATAATAATCATTTTCTTATCTTCTTGTATTT
TTAAAAGTATGTAAAAAAACTTCCACTATAATTAAAATTTTCTAAATATAATTTGTAGCTATAAATAATT
AAAATCTTACAAATTTTAACAATATTTTTTTGTTTTTTGAATTTTTTAATATTTTTTTTTCAAAGTTTTA
ATATATATATATATATATAGAGAGAGAGAGAGAGAGAGAGAGAGAATCAATGAAAAGCTGAATCGTGTCC
ATTCTCCCCTTTAGAAGTAAAAAATAATAGGAAATTAAGCTGATTATAGACAAAAGGATATTTTCTACAA
AATTGACTAAATCATACGGACTGAATTACCCAAACAAAAACTATGAAAAAGTCTTTATTAAAAAAATCAA
TACCACAGGAACTTCTAATATCATTAAATCAAAATTATTAGGTACATCAAGTGGTGTCCTCCATAAAATA
TAGAGAGAGCTTCTAATATCCCTCTGGTGTATATATATAGTTCCACCATAAAATTATTTATAGGTACCAC
TTGTACATTTTTATGTATAGTTTTAAAACCAGCCGGCGGGATCTAAGACCTGGCTGATCCAGGGCTGAAA
CTGAGCTGAATTTTAAAAAAAAATTAAGAAAAGTCAAAACTCGGGGTGACCCGGCTGACCCGATAGGTTG
ACTCGGTTATCTCGGTAAAAAACTTGGTTGCAATCCGTTAATTTTTGTTTTTTTAATAAAATTTGATTAA
CCCGAATGATTTAATAACCTAGTTAAAATAAAAAAATCCAGATCTTTGACGTTACCGAGTTAGATTTAAA
AATTCTGATTTTATGTGAGAAAAAAGAATGAAGTTATATATACACACACTTCAGAGAGAGTGTACAAACA
CAGCAATGCTCCTCTGTACTGTCCTGTGTATTTTCATCTCATGTCATTTACATATTAATTTTTTTTTTTG
TAAAATTTTTATATTTTTAAATTATTTTAATATGTTTATATTAAAAATATATTTTTAAAAATATATTATT
TTAATATATTTTTAAATAAAAAATATTTGAAAAAACGATGTTAAACAAGATAAGAAAGGGAGACCACATT
TTTGTCTGTGGATAGATTTAGTTTTTGTCCCTCATCTATGTTGGACTTCAACCCCTATTGTTTAAAGTCT
TTCCATGTTACCCTTCTAGTTTCAAGAAGTTCCCAACATCATCCCCAACTTACCTTTTGAATTTAGTTTT
TGAGAAAAATATTATGACATATACGAGGATTTAAATGAAAAATGAGAGGAATGTATGAGGAAGAAAATCA
AATTATGAAAAATTCATATTTTTTAGTTATTTAGTGGTAAATGGCAAAACAATTAAAGAAATACAAGGAT
AAAATTAAAAAATTTCGAACTATATGATTAGAAATAGAACAATGGTGAATATATAGGGCAAAAAAAGAAA
AGAAAAAATAGGATCAGGTGTTGGAGGCTATAATTAATTATAAAAAATAGTAAAGTTTTTACGTTTTACC
GGCAGTGAAAGTGAATTAGATAGGTAGGGACGGAATCGGATGAGTCGGTCTCTTCACGCACTCAATAAGC
CGAGCATCATCCATCCAATCCATTCCAATTTCTTTACAGAGAATTGAAGAAGAAGCTTGATTCTCTCTCT
TTTTTTTAAAAAAAAAAATATTGGATTCTGTTTCTTCTTCAATCCATCCTCAGCTCCCAAAGAAAAAAAC
AAGAAGAGGAAACCACCTCTCTATCTCTTCTTCTTACAGGTAACTAATTCATTTATATCTGCTGTTACTT
TCTTATTTGTTTATTTTTAGATCTGTATGTATATGCATAAACAAAATCAGAAGATATGAAGAAATCGTAA
ACCCTAACTGTTTTGCCGCTTGGTAGATTGATTGATGGGTTTTTGGTTTTATCGGGATTCGCTTTGTCTT
AAGATATACAGCACATGAATTGTAGGGAGAAAGCCCAAGATTTTATTAATTGAGTTATGGATCCTATGCT
GTGATAACTATTAGAAGGATTGTCTATTTATATCTTTCCAATCATTGTTATGTTGTGTTTAGTGATGGTT
GAAATTGAATTGGGATTTTTCTAAAGGTTTGATGATTTGGCTTTGCAGGTGCCCCCCGCA
Sequence ID: 128
Sequence Length: 3518
Sequence Type: DNA
Organism: Poplar sp.
TTAAAATTAAAGTAAGTTAAACAGTAGTGAAAAAATAATATCTTTTAAAATTATTTTAATGGAAGGTTTG
ACATAAATAGAAGACAAAATACATAGAACAGCAGTAATGCATGCTGCTAGAGCACACCTACAGACCTAAT
AATAAAAACACTAACACAAAAGCCTTATGATTCAACAGATAAAAATAGATAAGCATTTTCAAAAACATTT
AATACAAAAGTGAGGGAAAAATATACCTCTTCTAGCTGCTGCATCAACCTGCTTGTTGCTAAAAGTCTAA
GCACGTCAAATCCACCTTGGTGTACTTTTTAATTAAGTTTTTTTATTTTTTTATTTTTTTTCCTTTTATT
TTTTTTAAACTTCTTATAATTTTTTATTTTACCCTTCAAATCAAATTTATAATTTTTTTTTCCAGTAACA
ATAATTTTTTTTTAATTTATTAATAATTATATTAATAATATTAACAATAATAGTAATGGTGGTGGTGATA
ATAATAAGCATGTCTGACCCAAGTTTAAGTGGGTTTGACAAGCATGTCTGACCTATATTGGTTAGGTCTA
GCAAGCATGTCACGCTCATATTTTTGGGTTCGGTAAACATGTCAGACCCATATTAGTTGGGTCAAGTAAG
TATTTCAGACCCACAGTATTATTCAATTCAATTCTTTTGCTTTTATTTTTTTTATTTTTTTCCCTGATTT
TTTTTTAAAATTATTATAGTTTTTAATTTTACCATTTAAATCAAATTTTTGGTTTTTTTTCAATAGCAAT
AGTATTTGTTTTCAATTTTATAATAATATTTAACAAAAATAACAAAAATAACAATAACAATAATAATAAA
CAACATCAACACTAATAATTTTTATTTTTACCATTTAAATCAAATTTAAGGGTTTTTTTATAATAATAAT
ATTTTTTTCAAAATTATTAATAATTATATTAATAATAATGAATATAATAATACTTATAACATTAAGCATG
CCTGATCCAAGTTTAAGTGGTTTGGCAAGTATGTCGAATTCATGTTGGTTGGGCCTGACAAACATGCCAA
ATCCAACAGACCCGTATTAGTCGGGTCTGACAAGCATGTTAGATCTACTTTCTTTCCTCTTATTTTTTTT
CTCTCTATTCTTCTCAAAAATGATTTTTAAAAAATCTATTTAGAATTTCAAAGTTGTATTTGAACTATTT
CAACAAGAAAAGACAAAAGAATCCTCTAATTTAAAAATTAAAAATTTGTATCAAATCCAAACAAACTATT
TTATCCGATAGAGATTTTGCCCGAAGAGCAAATCAGAATCTTTCAATTTGAATGGTGATTGAGATTTTCT
GTTCTTAGAAATTATCTGCGTCTTTTGATATATCCTAATATTAATTCGATCTCAATATGAATTTATTATA
TTAATATGATTTCGTCCACAGTTTATAGTGGGACTTCCAAGGGATTTTTTTTATCAGAAGTGTGAAAGAT
TTTTTATGGTCTTGATGGAAAAAAAATAAGAAAAAAAATATTTTCATCGCTCACAGTACATAAAAATTTT
ATGTAAGATTTTTATGTTAGTTACAGTACCTAGCAGGAAAATAACTGAAAGTCTAATTTACTGAATTTTA
ACTGGAATTAAGAATATAAATATGAATTGGAATATGTTTTTTCTAATGTAAATAATTATTATAAAAGGGA
AAAATAAAATATTTTATAGACCCAAGATTCGATATTATTTTTATTACTATAATCATCATCAAGAATATAT
ATTAAAAATCAAGGATATGAATTTAATTAATTTTAATGTAATTTTTTTGTTTCTATTTTTTTTTATTATG
GGATTTCTTGTTGTATTCGATGCTTAAAATAGATTATCAATAGACATTAGATTTAATAATTTTATTTTAT
ATCAATTGTAATCTTAGTTGTTGTGTATCAAAACTGATATATTTTTTTATGAATTATATTAATATTTTAA
TTTCATTTCCAATTAGAGATAGATTTGAATTCATATCATTGACATATAAAAAAATAATATTTTTTATATA
GAGTAGTCTTTTAAATACCTACGTATAATTTAAATATAATGATATCTATTTAATTTTTAAGAATATCAGG
TATGGATTTTTTAAAATAAGATACAAAATTTGTTTTGTTTTGATATATATAGATAATACCGTGGGCTTAT
CCAGTGCAAACACAACAACGATTCACTCGTAAGCCCAATTGGCCGTAACGAGCAAACCCGTGCCATGGAA
TGACACCGAACAAAGATTCGTCAAGCCTTCTAATAAAAATCTCAGTTTTTTTTATTTCAATATTTAAAAT
TAGAAAACAAATTATCAATTTTTTCTCTACACCTTCAATGTATTCATAGACTAAAATAAAAACATGCTGA
CTAGCATAATACGTACTAGTGATAATTCTTCATTTTTTATTATTTTGGCTAGACTTATATTTATTCATTG
TTTTCAAGACGAGCTATTTACACCATGGTTCTTACAATCTAGAAAAATTAATTAATTAATTAATCTTTTC
GGTTCTATCAATTATATAATCTTTAAAACACACATAATTTAATTTTGTCTATACATTTTATGTGTTTTTA
TAATTTTTTTATTTATTTAAATTAAAAAAAAAAGCCAGGAGATGGGAAATATCAAACCATTGAAAATACA
TTTTTTCAAACAAAAGGCTATCAACCTTCATAGTTATTATTTTTATCACAAAGATTAATTTTGCTGTATT
TAATATAAAAATCACACGCGTAACGTGGAAGAAAAATAAAGGTCACAAAGCACGCGCGTATTTGAACCAA
TCCTTTCAATGCCGTCCATATCTATCCTACTAACCAGCGTGATTACCACGAATATCATATCTTGCCAGCT
CATATGTGCCGTCCATTTCCACACCATTTAAACGGAATCTCAGCCCTCCATTATTCAACTAAGCGACTAA
TCCTGTCCGTCCATTCTCCCAAACCCTCTATATAATAATCACATACACAACTTTCATATCTACCTAATCT
TATCAGCAAAGCTCTAGTTTCTCCATAGATCTACTCTTCATGGATCATCCTTCGATCTTTTCAATTGCAG
CTTCATATAGATCGCCTTGCGATCTTTATCTTGATATCCGTTTCGATGCTCGAACTCCATGATCTTGATT
TGCTCGGAGATAGCTCCAGAGGTATGTATAAGTGTTTTGTTTACGTTCCTAAGCTAGATCTGATTGAATA
TCTGTCTATTGGTTATTGATCAAGTCATTAATCCGCGTAAATCTAATTTTGTTCTGTAGATGTGGCGCGG
CTCTGTTTCGATAGCTCAAATATTAAGCGGATCTGTCCCTTCCGGCCATGCTTTCTTCGATCATGAGGAA
TTTTAGCAATATTTAAGTTTGGTTGTTGGCGGAAAGCAGAAGATGATTTGAGATTTTTTCTGCAGGTGGT
GTTGTAAGCAGTTACAGAATCCGCTGAACGTGTTGCTGGATGTAGACATGGCTGAAGATTGGTTATGTGA
GCTGTGGTGTAGCATGTT
Sequence ID: 129
Sequence Length: 3590
Sequence Type: DNA
Organism: Poplar sp.
TCCACTCTTGTTATGAGCGACGACCACAAAAATCAGAAATGTGAAGTAAAAATACAAAGAAAGTCACAAA
ATCACATGCGTACACCAATCAATCTAATTATCTAAATGTTGTTCTTGTGGGATTATTTTTTAAAATATTT
TGTTGATTATAAATATATTTTTTTATTTTTTAAAATTTATTTTTGATGTTGAATATTAAAATAATCAGGA
AAATATTAAAAAAATAATTTTAATTTTTTTAAAATTATAAATGAACCGTGTTTAGGCCGTCCACCTATTT
GAGATTGTGATAACAGTCACGGTTTAAAGTGTTTTTTATTTAAAAATACATTAAAATAATTTTTTTTTAT
TTTTTTAAATTATTTTCATGATCAACACATCAAAAAAAAATTTAAAAATATATAAATTTTTTTAACAAAA
ACAAAATTTTAAAAAACATGACAAAAGATCTCGTAACATTATTGACTAATTAACAATATCTAAGTGGTGT
GGGGGAATCACTGTTCCCCCACACCTAAATCACTGTGGATTACAACAGTAATTCACGATGTTTTTTCCTC
TTTTTTTTTGCATTTTTTCATTTTTCTTTCCAACTTTCCCTCCTTTTTTTTTCGTTTTTGTTTTTGAAAT
TACTTTCCTCTTATCTTTTGCTGGCTTGAGTGGCTGAGGGTTTGGACATATTTGTTCATACAAGTTTCAG
CCATCCATTATATACAAATTGTTGAAACTGACATGACATCTTTATTGTGCGTAGCAGAAGCTTTGGAGGC
TCTTGTTATAATTTTTAGTTGCCTTCTTTGACATAGGGATTTTTTTGGGACTGTGAACAAGTTGGAGGTG
CTGCAACTAGGAATTGCTTTCTATTTGTTTGCAACTGGTAGGCCTTGTAACATTCCCTGGAGAAGGAGTG
GATTGAATCTGAAATTAGCTCGCTCATGTATGGTGCTTGTAGTTCATTTTTTCCTTCCTTGTCAAATTCT
CATTAGCCTCCGGATGCTGTTTCATTCAATCTTTGTTCTTCTGTTGATGTATTTATATTATTGCTCTTTT
GGGCTATTGTGAAAAATATGGTCAGTAAAAAGCCTAGAAAAAACTCACCGGAATAATAATTCACGATGTT
TTTTCCTCTTTTTTTTTGCATTTTTTCATTTTTCTTTCCAACTTTCCCTCTTTTTTTTTTCGTTTTTGTT
TTCGAAATTACTTTCCTCTTTTTTTTTCCAGCTTTGCTTTTTTTTCTTTTTTTTTTCCATTATTTTTTTT
TAAAAAATTATCTTTGTTGATTTTACTTTTTAGATATTGAGCTGGTTAAAAATTCTGCTTTGTAATTTTT
TTCCTTTAAAATACTTTGGATTGCTACGGTGTTTTCCCACATAGTTTTTCTATTTTATTTTTTTTATTTT
TCAAAATTATATTTGTTGATTTTTTTTATATTGAGCTAATTGAGAATTTAGTTTTGTAATTTTTTTATTT
AAAACATTGTTTATTGCTACAGTGTTTTTCCGCGTGATTTTTTTTGTTGTTTTTGTTTTTTTATAATTTT
CTCCGAAATTATCTTTTTTTATTTTATTTTTTAATATTGAACTGATTAAAAATTACAGTTACAATATGCG
AGGAAAACACTGTAACTTTCCTCGCAAATTACTGTGGATTGCTATAGTGTTTTTTCTCATATGGTTTTTT
TCTGTTTTGTTATATTTTTTTCTAAAATTGTCTTTGTCAATTTTATTTTTTAAATATTAAGCTGGTTAAG
AATTGCAATTATAAGTAAATACAAGTTTTTCCTCACAAAACACTATGGATTGATACAGTTTTTCCTCACA
TGGTTTTCTTACAGTTTCTTTTGTGTTTTATTTTTTTGTAATATTTTTTTCCAAAATTATCTTCGTCGAT
TTTATTTTTTTTAATATTGAGTTGGTTAGAATTTAACTTTGTAATAAAACTTAATCATGTGGGGAAAGTA
TTGTAGCTTTCCTCACAAAACATTGTTGAAAATTACAATTACAAGTCATTACAAATAAGGTTAAATCATG
TGGGGAAGCACTGTAGCTTTCATCACAAAACACATGGAATTGCTACAGTGTTTCCAACATGATTTTTTCC
CCTTTTGTTGTGTTTTTTTTCCCTAAAATTATCTCTGTCGATTTGATTTTTTTAATATTGAGCTGATTAA
GAATTTAGCTTTATAATTTTTTTCTTTAAAACACTGTGAATTATTACAGTGTTTTCCCATATGATTTTTT
TTTCTCCAAAATTATCTTTGTCCATTTTTTTTTAATATTAAGTTGGTTAAGAATTATAATTACAATAAAG
CTAAATCATATGGGGAAAGCGTTGTAGTTTTTCTCACAAAACATTATGGATTGCTACAATATTTCTCTAA
ATGGTTTTTTATTTTATTTTATTGGGGAAAGCATTGTAGTTTTCCTCACAAAACATTGTCAATTGCTACA
ACGTTTTTTCTCATGGGTTTTTCCTTCCAAAATTATCTTTATTGTTTTTTTTTTATATTAAGTTGATAGA
TAATTTAGCTTTGTAATTTTTTTTGTTTTTTATTAACAGAAAAGCTAAATCATGTGGCAAAAACACTGTA
TCTTTCCTCCCAAAACACTGTGAATTGCTACAAATCATTTTGTTCAGTCTCTAAGTTTTGATCACCAACA
TAATTTTTTTTTTCATTATAAAATATTAGCTCCATTATACTTTTAATTTCTACTAGTGATAATTTATAAT
TATAATTATAATACTATTAAATATATTTATTTTATAAATTCGGGGCATGCATCTTGTCTATCTTAACCAG
CGTGATTATTACGAAAATGATGAAGTCAATATCTTGCCAGCTCGTCTATACCTTCATCGCCACCTACTTT
TTCAAACAAGGCAACCACTCAACCACGTAAACTAAATCTCAGCCCTCAATCATTCAACTAAACTACCAAT
CCTGGCCGTCTATTCTCCCAGATCCTCTATATAGTCACACACCCGCCCATCATTCTTTATCTGCCTTAGC
AGCTAAGCCCTAATATTCGTAGATCCACTCTCCACGGTACCTCATTCGATCTTTTTGATTCTAGCTTAGC
CTAGATCGCTTTGCGATCTATATATTGATACCAGATTTGATATTCGAAGCTCATCCGATGCTTCAACTCT
ATGATTTAACGGTCTGCTATCTGGTTTGATCGGAGATCGATGTACGTATCAGTATTTTTCTTATGTTTTC
CTTTGCTATAACTGATTTAAACTGTGCTTCCGAATTATTGATTAAGCTATTCATTTGATGTTGTTTTGTA
GATGCAGCGGAGATCTGTTTCTATGGGTCTAATTTTCAGGGGATATATCCCGTCGGTGTGCAAGCAGAAG
ATGACTCGAGATATCATTTGAAGGTGGAGCGATAAGCAGTTACAGAATCTCCGTTGCTTGATCATGTAAC
CTGAGCAGTGATTTGTTGATTGATTGAGGAGTGATGGAAGGAGATAAGGGGTGGGGCTGTGTGTTTTGTT
TATGAGGATGATGTATAAGATACATATATCGGGACCAAAAGGCCAGGAGGCTGAGAGGTCTTGTTTATTA
TCTGTCATCCGACCTTTGCC
Sequence ID: 130
Sequence Length: 4214
Sequence Type: DNA
Organism: Poplar sp.
ATTATGCAAATGACGCCATAAAGCCATTTAATCTTCGATAAGTTAGTGTATGATCTTTATCCCTGTAAAG
AAAGTTTGTTTTGCCACAAACAAACAAAAGAAAAACTCACGTTTATTCTCCAAATCGCTGCTGAAATTTG
TAGGTAAAAAAACATAATATAATCTCCTCTAACGAACCCAAATAGGCTCCTTTTGGGTTGCAAGCTAATG
AGCCTAAACTAGTAATCAATTAACATAAGTCCAATAATGAAATAAATCCCTAAACAATATCTAATGAGCC
AGAACAAACCCAAATTAAAAATAATTATCCAAAATTAATTAAATAAATAAAATAAGATAATAAAAAACAA
ATTCTTCATGCTAAAAGTCCTCCATGTAGCCCGAATCTCTATTTTTCGCACATTCTTGGCAGATTTTCAG
TCTTGACTTTAAACACGTCGTTCCTTTTCTTTTAGATGAATTACTAGGCCTACCATATATGGTTAGAAAT
TTTGAGATGTCTAGTTTCCAGCCCAACTTGAATCGCAGAACAATTACACATGTAGCTCCAGATATGTCCT
AAATAGTACACAAAGGTCTAGTCTGACAGATTTGACAAGATTTGTCTAGTAACTTTAACCTTCTGGAATA
ATATGTTCTCGAACTTCATTTAATCTGAAAATTTACTAAAATATATTTCCATGTCTTTAGTAGCTTCCTG
TAAAATTTCAGCTCATTTTGATATATAGTTTGAAAGATATGTTCAATCTTGCAAAATTGGTCAGCAAGCA
TTTTAAAACCAAATTCTAACCTCACCTAGTTTGTATCAACTGTCTTTCCAAAGATTGTGTACATGTCAAG
GCTAATTTAGATAAAGCAGTTATTACAAATTCAGGAAAGTGAATTCGGGAATTTCACAAATGCTCTACTT
TATTGTACATGCTTTATTTGATTTAAAAAATTCATAGATGTTAAATAATCTAATTTTGTTAAAGCAAGAT
TTAGGAAGGGTTTCAAGTAATATATGTTTGATCTGATGTAGCTGATTCCTCCAAGACTAAAACTTATGGA
GAATTATGTATTTCCTTGTTCATTTTTACAAAAAAAGAAGTAACAAGCTATGGTGATAGTCACAGTTTTC
AATATGAATGAGAGAGGAAAGAAAAGAATAGGGTGATAACATATGTATTTAGTTAATTTTCACAAGGCAA
AAGCTCATGAAGAGCTATGTATTTCCTTGTCCATTTTGACAAAGAAGGACGTAACAAATGATGGTGGTAG
TGATTGGGCTTTATAGTGGAAGGCATAGTTTTGAAATCTAGCCCGGCTGGCCAACCCGGGACCCGGCTGG
TCCGGGGCTGAAATCGGGTCGGGTTTAAGAAAAAATAGAGGAAGTCATAATCCGGTGTGACCCGGTTGAC
CCGACAAAACCCGGTAAAAAATCCGGTTGTAACCCGTTGACTATTTTTTTGTTTTTTTTATCGAAACGAT
GTTGTTTTAATTTATAAAAAAATAGGGTTGACCCGGGTGACCCAGACAAAACCAGTGACCTGGGCCTTGG
ACCAGGTGGACAACCAGGCCGGGTTTCAAAACTATGAAGGGAGGGGCTACCATCATGTTTCAGAGAGAGA
GAGAGAGAGAGAGAGAGAGAGAGGAAAAACAAGGAAAATAGTGGTAGCTTTGTGAAGAATTTTTCTAAAG
ATACTTTTGATATTAAAAAACATCACTATAGCAAGCATATAATATTTTATATGTTCTCTTGATTGAGTTG
TAATATATAATGTGAAATTAATTTTAAAACCACGGATATGCAAGTGTGATTTATAAAAAAAAAATTGGTA
TGTAAAATATTCATGTATTAAAGAACATGAGCTTTTTAACAATTTTCTCAAATATAAATATTATATATAT
AATAAAAATTTGGATTAAATTTGATAATATTTATAGTTTATATATTGTCCATTGAATAACATGACTGGAA
AAAAAAACTCAAATAAATTGATTAAAGTCAATACAAATGGATATTTGAGTTTGAAATTTGCGGTACCAAC
TCCAGGTAAACCATTCACATCATTGTCAATTACCTAAATCCGAAGAGCCAAAAACTTTTTCCCAAGCCGC
CGAAAGAGACCCAAGCCCATGACTCAAGCCACCGAGCCGGCTACCGATTGAGGTTGGTGAGTAACCAGCC
ATGCCGGTTATTTCAATCAACCAAATTATTATTAGTAATGGTAACTGCTTTGTTTTTTCGTCTTTTTATC
TTTTTCTTCTTAAGTCATTATTGTTTAAAAGTAAAATTTAAAAAAGAAATAATTACAAAAATCTTTCGAG
ATCTAAATTTTATTTTTCCACTGTATTTTTATAAATTATACTTTACACCCCAAATTAAATAAAAAATTCA
AATAAAATATATTATTAAAAATACAAACTATTATTAAACATATAAACTATAGGGTGAAAGGTGTAATTTA
TAAAAGTATATAGAAAAAAATAAAATTTAAATCATACTGTAAATTTTTTTTTTAATTATCCCATTAAAAA
ATAACAAAAATAAAATAAATTAAAAATACATGAATATTAAATTAACTGGATCTATAATTACACTTTATTT
TAAAGTTATTATAGGATTATTTAAGTGGATTCTTAAAATATTTTCAAATTATATATTAACAAAATTAACC
CATGAGCTAGAAAGTTAATATCAACCCTCGAAGACCATATTAAATTTGAAAAGAAAAATTTAATCGAACA
AAAATAGCAATACATCTATATAGTTTTCCAAGAGTAACAAAGAAAAATTACTTCCAAAAACATTATTAAA
CACCTTGAAAAATGAAATTATTCTCTCATTTTTATCCATCTTCCACCAACCCCAACCAATCCAAATTCTG
ACATCCAACGGCTATGTTTTGTCCCTCAAGCAATTGACAGAATCCACCGTAGATTTAAGAGAATCCCAAA
CCACCCCATCCGGTTACCAGTAGGTAGGTCTATAAATACTAAGTAACCAAAGCAGTTTTATTTCGTGATT
CTTTGGGGTCTGATTAGAAACTCTCACACAGGCCGACAAACTCTTAAGCTTTCCTTTAGATCTGTACCGG
TGAGTCCTGTCCAAGGTACCTCCTGCCCTTCTCCACTTTATAGTACTGTTAACTCTATATCATATTGCAT
GCTCTCTTCATGGGTTTTCTTTGCAGACTCTAGAAAAATGAATGTTTAAAGAGTGGTTTTTTAGTTTCTT
GGTCTTAAGTTTTTTAGTAAACATGGTTCAAACAGTTACAGATCTGGGTACTTGTTGCGTTTATTCTGGA
GTCTGGTCTGTGTCGGGTGTGACGTTGAAGATTTCGTTTTGACTGTTAGTGTGTGCAGAACATCATGTCT
GAAAGGCATGTGTTTCGCTTACATTTTCATTAAAATACATCAGATCTGATTATTTTTATCAATTTGATAG
TTTTTTAGTGATGAACTCTCTGAAAATATATCGACAGATTCCAAGAATGTTTTGTATTACTTGAAAGGAC
CATGTAGGGTTGCGATCATAATCGTATCAGAGTGCCTCTTGCTTAGATCTAGTGTTTATTCATTTCTATC
GTATAATTACTAATAAATTATACCAAGAAAAATGTAACTTTGCGCTTCTGCAAGTAACTGAGGCACGTTT
GGTGTCTCTACTTTTAATATAATCAATGGTAGAAAAAAAACTGTTATAAACTGTGCAAAACACCTTCAAT
TCATAATGGGGCTCACGATACTCTGGGAGCTCACTCTGTATGAGAAGCTAATATTTTTGTTTGCCGTTTT
GGTACTTTCACCATATCATAGCATGTTAATACCTGAATTTTCACTATTGGGGGTTGTTTTATTGGGTATT
TGATTCTTTTCCCGACTTTTTTTTTGACAAGTGATTCTATAGAAGTTTATCTCTTCCAGTGCTAAAGGAA
TCTAACTGTTCTTTGTTCTTTTTTAATTGCTCTCATTCAGGAGCATAAACTTTTGAGTTTCTTATCATTT
CCTGTACTTTGATTCTGCCCGTTTATAACTTGTTTTAGAAAAGTTTGAAGAATCTTAATCAGTCATGAGA
ATATTTTCGGCACTATTCTTTTTACCATATTCTCACATGTTGATGGAATTTTGCTTGCCACACTAATTAA
GCAAGCTTAGTTTGCACACAGTTGCCACATGTCATCATATTAAGAGATCTTTGTTGTGAATTTTGTGACA
TGCAGCTCAAGAAA
Sequence ID: 131
Sequence Length: 3000
Sequence Type: DNA
Organism: Poplar sp.
AAAATATTATTTTAATATATTTTATAATAAAAATCACTTTAAAAAACAACCACTATCTTATTTTCAAACA
AAATCATAATAATATCAAAGTTGGTGACGCTTACCAACCCCCGACCGATTCTAACTTTTTTTCTTAATAT
TATTTTAAGCTTATTTTGAAAATTGAGTCGTTGTAGGTGTCAATTATCATATTGTTCTTGTTGAGTGCAC
ACATGTTATTTATATATAGTATTTGTACGGTTGGCACGTGAACTTTCCTAATTTATGTGCATCATTTATT
GGGATACATAGGAATTCTCATTGATCCAATGAGGGAATGGAAAAATAAATAAATAAAGAAAACTAAATTA
TAATAAATAAATTTAATTTTTAAAAAAAAACCTCCTTACAACCACCAAAATAAACGGGCAATGTCTTTCG
ATCATAGTGGTAAGAGTTTGGCATCAAGATATTTGCTATTTCTGTGGTCTCAGGTTCGAGCTCTGTGGTT
GCTAATATGATGGCCACTGGAAGCTTACATGGTCGTTAACTTCAAGACCCGTGGGATTAGTTGAGGTGCG
CGCAAGCTGATCCGGATACCCACATTAAACTAATTAAAAAAAAAACTTCGCTGATGAACGAGGACCACCA
GCAATAAACCTCCATGCTGATGCAGTAACGCGTCATGCTGCGCGTGGGATTAACCATTCACATCGTTATC
AGTTACCTGAATCTAAAGAGCCAAGCTCATGACTCAAGGTCACTGAGCCGGCTACCGGCTAAGGTTGGTG
AGTAACTAGTCATTCCGGTTATTTCAATCAATAAACAAAACAAATCATTAGCAGTAACCAGCCAAGGGTG
TTTTTTTTTTTTTCATTTTCAAAGACAGTATTTCTTAAAGAATAATGTTAAATATTAAAAAACAATAAAA
GAAATTTAAAAATACACTCGACCCTTGAATTAGTGAAATTCATAATTGAATATCCCCTTAGAATCACGAT
CAAATAACCTATTATATTCTTTGATTTTTTTATTTAATATTTAGTAAATTAAATTGTATGATATATAATT
AGATTCTACCAAACTATCAGTTTTTATGAAATTCAGTCCATAATCTAAAATGTTTAAGATTTCATATTGA
ATCCGGAACGAAAAATCTGGTAAAAAAAAGCATCATATAGTTTTTCAAATGTAATTAAGGAAAACTGCCA
CAGTTTTCAACACCTTGAAAAATGAATTTAATTTCTCACTCTACGTGGGAGTGTTTCAGTAAATTATCAT
ATTTTTAAAAAAATAATACAGAAAAAGAAATTAAGAAATTGTAAATTATATTTATGACACTTGTTTCACT
AATAGAGATGATGATAACAATCTATTAAACTTTTTGTTAAAAATATAATTCACACAATCATAAATAATCA
ATTCTCCACTATTAAAATACAATTCACATAAATAACACATAATATATTTAATTATAAATAATAAATATAC
ACTAATAATCAAAACAACATAGCATCTTATTAAAAATAAAACTAACTATAATATCCAAACTAGTTTACTA
ATTATATTTTAAAATATATTACTTTTTTTTTTTATGACGATGAAAAACAAAAAAAAATACCCAACCTATC
TCCCACCAACCAACCCAGCCCCCAAATTCTGACATCCAACGGCTATGTTTTGCCCTTTAAGTAATTAGCA
CCACAAGATACAGATTCCTCCGTAGATTTAAAAGAATCCAAACCACCTAATCCGGTAACCAGTTGGTAGG
GTAGTTGGTCTATAAATACAGAGTAACTAAAGCCGTTTTATTGTACCACACCACCACCGCCTAAGAAATC
TTGAGGTCTGGTTAGGAACACAAACACAGGCCGACAAAGTCTTGAGGTTTTCTTTAGATCTGTACGGGTT
ACTCTAGTCTAAGGTATTAACTCGTTGCACTTTCTCATCTATATTTAGCCTTCATGCTCTCTCTTTATGG
CTTTTGTTTATCAACTCTAGAAAAATGAATGTTAATGTTGGTTTTCAAATTCAATATAGTGGTCTTTAGT
TTTTGAGCTAACTTGGTTCAGACAGTTTCAGATCTGGGTACTTGCTGGTCTTTTAATCTATTAGTTCAAT
CAGTTTGGTTTACTCTGCTCTCTTCTTGTCGCGTGACTTTAAAGATTTCGTTTTGAATGTCAGTGGGTGC
GGTACATGATGTCTGGAAGATTAAACTTGTCATGTGTTTCACTTACAACATTGCAGTAGAGTGCAGAAGA
TCTGGTTTTTATTTACAATTTGATAGTTTTCTTAGGGGTAAAAGTGTTTAGAAATATATCCAGCAGAGTC
GAAAAATGTTTTTATATAATTGGAATGGACCATTTATGGTCGCAATCATAATCGTCTCAGTGTGAGTAGC
TTAGATCTGGTGTTTCTTATCCATTTCTATCGTACAATTGGATCAACAAGTTATGCCAAGAAAAAGCTAA
CTTTGCACTTCTGCAAGTAATTGAGGCACGTTTGGTGTCTCTACTTTTGATTAATGGTAGAAAAGAAACT
GTTGTAAACTGTGCGAAGCACCCCTGAATTTCACTCTGTGCGTGAAGCTAATATTTTTGTTTGCCGTTCG
GTACTTTCACTATAGCTTGTTAATACCTGAGTTTTACTGTCGGTAGATCTGTTGTTGGGTTGTCGATTTA
TTTTAACTTCTGTTTTTGACAAGCGTGATTAATTCTATAGGAGTTTATCTCATTCCAGTGCTAAAGGAAT
CTATTTCTTCTTTGTTCCTTTTTTATTGCTCTCTTTCAAGAGTACAGACTTTTGAGATTGTCATTTCTTG
TACTTGGATTATGCCCTTATTAACTTGTTTTGTAAAGTACGAAGAATCTAAATCAATCTTGAGGATATTT
TTGGCTCTTTCTTCCCCATATTCCTACGCGTAGATGGAATGTTGCCTGCCATAGTAATTAAGCACACAGT
TGCCACATGTCACCATATTAAGAGGTCTTTTGTGAATTTTGTGATCTGCAGCTTGAGAAA
Sequence ID: 132
Sequence Length: 3238
Sequence Type: DNA
Organism: Poplar sp.
AAATGATAAAAAATAAAATACCGTTTTACCCTAAAAGGCAGCCAAGTGATAGTTTTATCAAAGGCAAGAC
CGTCAATTTATTATTACAATTCACAATAAACAAAGGAATATGTACAATGATTTTCCCACATGTTTTAACA
TTTTTATCTAATCTTTAATAAAAACATCTATTAATAAAAAAAATTAGAAATGAGGTCAGGTCATGCTTTT
GGCCCCCCCAAAAAAAAGGGCTCGTGCATTGACTTTTAATTGTTTTTAAATGAATAGGGCGAATGACGTA
ATGCTCTGGAAAAAAAAAAACAACGCGTCATCTATCAGTCACCAGATTCCAACCATTGGCGCGACTAGAA
AACCAGTGTTAGTTTTTTTTACCAAAAAATATATCTTCAACCCATTAAACCAATTAATGACCACAAAACA
CACAAAAAAAACAACTCAAACCTAAAATCAACTCGAAAATAAAAATCTCTTGGAGCTCAGATATGTTTGT
TTTCAGGTGTTTTTAAGATAAAAAAACACTTAATATTAACTAACCTATTAGAAAATACATAGATCCATTT
TAAAATATTATCTATGAAGACATATCCTCTACCCATCTCTATTTTAAAAATGCTGAAATCCATTTTAAAA
TTTTTTAAAAACAAATTTATTTTTATATCATTATTTTTATTTTTTTAATCAAATATATCAATCTCTCCAT
AATCCCTGTCCCTCTGGTCCCATGAAAATTACCGAACACTACATGAAATAAGGCATGTTTGACGCATCAT
TTCCAGGAGCATTGATGTAATTAAACGTTGCGTGTATCACATAAGAGAAAATGTTGACAGCCCTTTCATT
GTTTCAGGCTCTGCACCCCGCATTTTATTTCCAGCACTCCAAACAAAGCCAATTTGCACCCTTGAATGTT
TCAGTACACTCGCTGAAGTTATTTCTTGGGGATTTTCGAACGATTCTTCGAGTGGTCTTTTTTCAAATCT
TTTCACGCAGCTCCTTCACCGTATTGCTTCCCGGACCTTGTTGCCGGATAAGTGCATCACTGAAGGCATC
ATCCATGTGTTCTGTCCATTTAAACGCATCTCGCCTTCCCACATGATTCTTCTCTGATTTATTACCCGTT
GCAGATGAACAGAGGCATCAGACAAATAACAAAAGCAGGCTACCGACCATTAACGACCAAAAAGTACAGA
TGCTGTCACCTTTATGAAGATTTCATAAATTGATTTTAAAATCATCGAGTTGTTTAGCAATTCACTCTTT
ATTATTTATTTTTTTATTACCTTTTTCGTTGTTTGTTTTTTCTTTTGATTTTGTCCCTCACGGTTTTTTT
TTAATTATCTTTTTTATGTTTTTTTTTCTTTTGATTTTGTCTCTCACGGTATTATTTCAATTATTTTATT
GCTTTTTAGAGATTGATTCTTCGTTCTTTTAATTATTTTTTTTGTACTTTTTAATTTTTTTCTTTCAATT
ATTTCTTTAATATTTTATTTCATTTGTTTTTTTATTCAATTTTGATCTTCATTATTTTAATTATTTTTTT
CATCATTTTTTTTATTTCAATATATCCCTTAACATTTTATTTTATTTTATTTTAATTAAATTTTAATCCT
TATTTTTTAATTATTTATTATTATTATTTTTTAATTTGTTTTTTCTTTCAATTAGTCCCTCAACATTTTA
TTTTATTTTTTTTGTAATTCAATTTAATTCTTATTCTTTCAATTTTTTTCTTATCATTTTCTTAATTTGT
TTTTCTCTTTCAATTTTCCCCTCATATTTTATTTTATTTATTTTTTATATTCAATTTTGATCCTCTTTTT
TTTAATTGTTTTTTGTAATTATTTTTTTATTGTTCACTAAAGTGCCTTGGTATTTATTTCATTGGTTTTA
TACTAGCTCAAGTCCTCATTGTTTTGATTACCATTTATTTTCTTTTTAATTTTTTGATAGTTAAGAATTT
TAGACAATACTTTTTTGTCTTATATAGGGTCATATCGGTGTTATAATCAAAGTTACTAATTTTAAAAATT
ATTCCAATTTAACTTCAATTTTTTTTCAATTCTATCATACATTATGGTTGACAAATAATGTATTGGAATC
AATTCCCATTGCATCTCTTCTTGCCAATCCAATTGTGAGTGTTATTGGGCATTCAACTTTTTTTTTTTTC
ATTTTCTTTCTTCGAGGTTATCCCAGGTTAACTTAACTTTACTCTTTTTTTACTTAATCCTTCGATGTTG
GGCTACTGGGTTTTGAGATTTTTTATTTTTTGTATATTTTTTTAATTTCTATAGAGATATCACTAGTCAT
ATTTTTGTCAGATTAACTCAGTATGACTTGGTTTATTTATTTAGCTCCGATCCTTTTCTCTAGTTTTTTT
CTTAAAATAATTTTCTTATCACAATCTTGCATCACGGTTGATGTGCTAGTAGAGTGGACCCGAGTCGGCT
CAAGTGTTTTTATTTTACATTTCTTTTTTTAAATAGATTTGTTTGTAATTTTATCATTTGAAATTATATT
TTTAGAGTCCCGAGCTTTCTATTTTTTCCCCTTTCATTCCTAAGATGTTATCCTAGATTGTGAGCTAGTC
AAGTTAACTCGGGTTTATTTAAGTTATATTTATTTTAATATCTTCTCTTATATTTTAAAAAAATTGACCC
TGGAAAAAAAAATAGTAACAATAATAAGAAAATGCTAAAGTTGGGCAATGGGCCAGATTATTGCAGAAAT
CAAAGTTGATCCATGGGCTGGACCATTTCAGCAATCAAAGTTGGGCTTGAGATCCCTGGAATCCAACCAA
TCTTACATTATCATAAATGATTACTTATGTGAGAGCAAAGAAGCACAAAGAGAAGCACAAAGAGGAAAGC
CAAATATCAAAGGGTAAGGCGTCCAAAACTTAAGACCCACGCAACCAATAGATTATAAGCGCAAAGATCG
ATGACGTGTCTAAATTTCCAAATCCCGCCTAAACCCCTGCCACCTCCCCAATTTCATTTCACCCGCAATT
GAATTTCAATTTCCTTCACGACACTTAATATCTCCGCCTCTCCCTCAACTCTCTTCCTATTCTCACACAC
AATATCCTCTCTCTACCACTCTTCCTCTCTCTTTCAAACCCTAACCCCCCACACCGGTAAGTCTCGCAGA
TTCTGAACGGATTCTCACCCTTTGATCGGTTCTCATTGATTTAAATCGTGTTTTGAGCTGATCCGGTGTT
AAAACTGCAGGTTTCTCC
Sequence ID: 133
Sequence Length: 3013
Sequence Type: DNA
Organism: Poplar sp.
ATATATATATATGAATTTCTTCGTGAATCTATTTAAAGTAGCCTGTTTTGCAAAATTATTTTACATAGTA
GTTAATGAATTAATTCAATATTCGAGTAATGAGATAGATGAATTAATTAGATTTGATTTAGAATAATTAG
TGTGGTTTTAAATTTTTTTAAAAAAATTAAAATAATATTATTTTAAATATAGGATTAACTTGTTATTATA
AACAATCAAGTTTAACCGAATAAATTTTTATAAATTATAGGATTAACTTGTTATTTTCTATTATAATGAT
AATATATAAATAGAATAAATTTTACTTTTTCATAATAAACCTTTTAATCTCGGTGCATGAATAACTTATT
TCAATCAAATTAAGAACATAAGCTTAATTTCAATATGAAAACTTCAATGAAAATATTACCATCAAAAGAT
TGGATTAAAAAAAAAACCATAACACCAAAATTGTTTCAATATTATTTTTTCCTAGTGGGACCATCCAAGA
GAGGTCATTTGATAACAATGATCATAGTTGGTGATTGAAGGCCCCATTTAAGGCACCGGCCTAGACACCA
TTGTTGGCTTTCGCTTGTCTCCACGCCCGTCCTTACATTGTGAAATTGTTTTATGGTTTAAAGAAAGTGA
AAAGCTAAAAATAAAAAAAATACCTTAAAAATAGCAAATTATTTGACCACAACAGTGAAAAGTAGTCCTT
CATTATTGTTTACATACACAAAAGGTGCCATGAATTAGCCTTTCTTTAGCCTATTACTATGATTATATGT
GCAGGTAGGAGGTACCCAAGCTCCCGTACCATTTTTATTTTATTTTATTTTCGATATTGGTTCAAAAAGA
AGTTGGGCACCATTAGTTTCTGTATTTAGAAAATTAATTAGAATACAAATTACATGGAATTTTTTTTTTA
TCTATATAGTGAATTTTATTTTTTTTTATTTTATTGGTGAAAATATTTGAAGTTGATTTTGGTATATCAA
GATTAAATTCTATCGAATTTTGAACAAGTTAATTATTCATATTTAAATCAATATATACACATCTAAATTT
TTTTTGATATGTTTAAAAATATTAATAAAAAAAATCATATGTGCAAAAAATTTAAAGCAAGCAAACAAAC
AAACAAAAGGGTAAAACTTGTCTCTTGATTGTACTTAATTAGAATCTTTGAAAATAAACAAAACAATAAT
GTACAAGATTTGCATTCAACTTGCTTGGGTGGCTCTTGATGTTCTCATATGGCAAAATCATTTTGTACAA
ACAAATATATTGCTTGGCATGTGATTGTGTCAAAACATATTAAATTGTGTTTGTCATGACATGTACGCCA
CTCCAGGTTTTGATGATAATGAAGACTAGCAGTTCCAAGAAAAAAGCCTTAATTCATGAAACACCATTTG
TCTTTTAGGTTTTGCAAAAGCTAAATCATATACCATTTCTTTTAGTATATAATCTTACTAATTATAGGGT
TAATTAGAATGGTGAGTAGCACGCGAGCTTATCAATTTTTTTTAATGCACAATTAATATATATAAATGTT
TATGCAAGTCATTAACTTGAGAATATTCAATAACATCAAATAATATAATAATCTGACTTAAACTATAGAA
AACAATAGTAGATAGTAGATGAATCGTACAAAAAATATTTGATAGCAATTAACTAAAACAAATAAAATGC
TAATATCATACCTAAAAGGAGAATAAAAAAAATCGCTAGAAACTCACCGTTATTCTACTGTGAATAATGC
CTACCACCAAAAAACCTTGCTGAGACGGTCCAAATCTCACTGCAAAAGAGTGCATGACATTAAAAAAAAC
CTGCATGGATCGATAGAGCAGCATTGCAGGAAAAAAGAGAGGAAGGATACTCAACCAATCAATCTTATTT
AACTCAAGAATAAAATTTATCTAAATATAAATTTAATAAAAAATATTATTTATATCCACAATGAATTGTG
TCCAGGTGAACAATGTTTTCTCCTTCTTTTTCAGTTTTTTTTTTTAAAATTGTTTTTCCTATATGGCTTG
GTTGCATCTTGCACCCGATTTTCATTATAAAAAAAAATATAATGAGGTGAATTTGATTTTAATATACTTT
TTATTTTTTTGTTTGATGGTAAATATATTTTTAGACTAACTTATATGTTAACTGAAACTAAGTCTACTAT
TGAACATTTTAAGTATATTATCGAACATTTTAAGAATATTTCTCTTATATCAATCTGGTGTGTGAAAGCG
TGTTTGGCATTGCGACAACGGTTGATTTCAAAGTGATTTTTGCTTGTAAATGCATTAAAATAATATTTTA
TTATCATTATTATTTTTGACACCAACATATTAAAACGATCTCGAAACATTAAAAAAATAATTTAAAAAAA
TTTAAATTAAAAAAAAACTGCATTTAAAACACTAAAACAAATTAAACATATTCAAAATAGAAACAACTCT
TCTCAACTAAGAAAAGAACAAAATGAATTCTCTTCAAAACAAATATCAGCATGATCAACACGGTTAATTC
GATCCAAAAAGAGGAACCATTCTATGAAAAAAAAAAGAAAAGAAAAGGGGCAAGGTTAGGCTAGTACAAA
TTAACAGAAAATCAAATAGAAATCCTATACAAAACATGAATGCAAATTACATGATCTAGGCAGTAATTAA
CCTCCATTATTATGCCCTCTTAGAAAATAAGAACACATGGGAACCCACTCAAAAAGAAAGGTATGGTGCT
GATATATGAAATGGCCTCCACCATTTGGATTGCCAATTCATATTTGATTTTAAGTATTTGTCAATTCCAT
CAATTAAAATCATATAAAAATTATAATCTCAATCATACTTTATATGAAAAAAGAAATAACATATTTACAA
CTAGCAAGACATGCTAAGGTGTCTTGTCAGCAATATGAGGTGTCAAGTTGAAAGATTCTCCAAGTGAGCA
TGCTCCCTATGATCTCATGCTCTCATTCTTTAAATAATCTATGCATTTCACTCCTCTATAAATAGCTCTC
GCA
Sequence ID: 134
Sequence Length: 3287
Sequence Type: DNA
Organism: Poplar sp.
TTAAGATATTGTTTTATAAAAAACCATTTAATTTTTATTTTATAAAACATCAATAAACATTCTTTTTGTG
CAACCAAACATGGTTCTTTTATATTTTAGATTTTACTAGGTTGCTTTCATGCGAGCATCTATTCTTTTTA
TCATATAATTAGATAAAAAAATAATTAAAAAAAACAAAGTTATCAAGCCTAATTAGGTCAATGATCTAGG
TCGCGAATTAATCGAGATTAGCCTAAGTCGATTCAATATGTTGTCACCTCAACATTTGAAGAAAAAAAAT
TATTCTTGAATTTTTTTAAGATACTATGTTTTTTTACCGGTTATCCAAGTTATTTTTGAACTATCAAATC
AACTAGTCATATCAAAACTAATATGTATTAATATGTGTTTATTTACTTGCTCCGCGACTTAACATTTAAT
TAGTGTTAATATACTTGATCTATTTTATTTAATATATACATCAAGTTTTGAGTTTATATTTTTTTTTTAC
TAAAAACACATTAGTAATATATGCATATTATTTGTTAAGTAAAAAAAATTGCTCCTCGCGAGCCAGTTAA
CTCGTTTGATAATTTTATGTTTCAATTTACTAGTTTGATAACTATTTGTATCATAATGCTAATATGATGA
CGAATTTAATGCATCAGGTAGTTAGTTTATTTAAATAAACGACTTTAAAAAAAATGTATATTTTCATATA
TACATTCATATCAAATCACAAAAAACCATGATTGATAAGTAGCTTTTTAGGTAGCGGTACAATCTGTGTT
TTATATATATATTTTATTTTTGTTTAAAATTATTTTTTTATTTTTTTAGTTTATTTTAATATGTTAATGT
AAAAAAATTTAAAAAAATATTATTTTAATATATTTTAAATAAAAAAATATTTTTAAAAATAATTATTACC
ACAATTTTAAATATATATTTTATTAAAAGTGAGGGAAGAGTTCGTGCCACAAAATCACAAACTTTGGCCT
TATGGAATTTACCTTGGGATTTTTGTTTTGAGATCAAGGAATTGTTTTTAAATTATGCTACTTATTTTAT
TCAATTTACAGTGCATCTAAATACAAAGAAGTATACTTAATCCATGTAAATAATGCAATGGTAGCACATT
TATACACACTTATACTCCTGTTAAAATTATATTTGATTATTATTTCAAGATAAAAAAATAAAATAATAAA
AATAAAATGCACATATCTTCATATACTTTATATTTTAAAAATATAAAATAAAAATAACATGTTTTTATGT
ACTTTGTGTTTTAAAAGTATAAAAATATACGGTATATTTTGTCATATACTCCGTGTTAAAGTGATGTTTG
ATTATTGTTTTGAAACAAACAAAATAAAAATAATTTTTTATATCTTCTTAGAAATACCAACTAGACACAA
TGTAATGAATTAGAGTACAAAGACAATAATCAGTACATATCATATAACTCACCTTCCATTCAAGAGGGGG
GAAAACAACAACGTTGCTGTTGAGACAAGAATAACATTAAAATGTTAGAAAGATACTTAAAATATTGATT
GTCAAATATATATGATAGCAGGAACATGAAAATGGAATTCAGTGACTAAGAACAACATTAAAAAGGTGTT
CGAGAATGTGATAACGATTGTTTTTAAAAATATTTTTTGTTTGAAAATACATCAAAATAATATATTTTTT
TATTTTTTAAAAATTATTTTTAATATCAATATATCAAAACGATCTAAAAATACAAAAAAAATTAATATAA
TATAATTTTTTATAAAATAATTTTAAAACAACAAAACAAAAGGCCTCTAAAACACTACTATATGAAAGTA
TGGTTGCCTATAAGGGTGAGCAAAAAAACTGAAAAATCAATTAAACCAAGAAAACTGGAAAAAAAATAAC
CGAAAAAACCGAACCGTGAAAAAAAAACCGATTAAAATTTTGAAAAAACCGACCGGTTCAGTTTTATAAG
CCTGAAATAAAAAAAAAACCAAACCGAACCCAAACCGAAAAAAACCCGGAAAAAACAGAGCCAGGCCGAA
AAAACCCGAGTCAAACCGGAATAAACCGAGCCAAACCGGTTTGAACATGTTTTTCTTCTAAAAAAATCAA
ACCGTAATCAGTCGATTTGAACCAATTTCTAATTTTTTTTAAATTCAATTTAATTATTTTTTTTTAATAC
AAACCGAATCGAAGCGAAAATAATCAAATCCTGGTGGCCTAAAAGAGCTTGGGTAAAAAGAACCTCTTTG
GATTGTGGTACTCGGTTAGCCATCATAAATTTAGATGGGCTGAATATCTAAAAGACAAAAAGCATAGAAA
TTAAAAATGAGAATGAATAGCATGTTGCTTATAACTTTGGCATAGAAATAACATAGCATTGGGCCAAGTG
ATTTTACATGCAAGCATCATTATTGGGAAAATTGTTTTGTATTTTTCTCAACAATGAACACATTTAATAT
TTTTAAATGTTTTTTTAATAATTTATATAAAAAACATAATTTTAATATATATTTTTTATTAAAAAGCACC
ATTTATCAATCAAAACATGTATCAGTAGAAGAAGGATTAGATCAAACCCAATCAAAATCAATATTTATTT
ACATGAAAGCATGAAAAATACAAATAAAATATGTACATCATACTTAAAATGTTTTTTTTTTTTTTTAAAA
AAAAGAATACAATTAAAAAATATAAAAAACTATTCGAACAAAATTAATCGAAATATGTTCGAGGAGAGGA
AGGATTGAATCAAACCCAGTCAAAATCAATATTTTTGTTCATCTATTGATTTATATCAAAGCATGAGAAA
CACAAATAGAATTTAAAAAAAAAAACTGACAAAAGGATATAATTGAAAAACATAAAAAACTATTCGAACC
TAATCCATAAATTTCACATATCTAGGAGGTTCCCTCAAAATTCTAAACAAAATCCATATCCCTTTCGGTT
TCGGATTGTTCGAGTGCCGTGTCCTAGCAAATATTAAAAATTCTTGCGAATTTGTCCCTTGCCCCCCCCA
AAAGAGCAAATTCCCCACTTGCCCCAAACTAAAAATAAAAGGTTAATCTTAATCCCACGGCCACAAGGAC
TCATTGGACAGTATTTAATTTCCAACGTACTTTCTTGTAAATTTACAATCCCATCTGATTACTCCTGGTT
CCAGCGAAACCCTCGTCTATAAATACATACTGTCCCTAACCTGGCAAAGTCTCTCTCGCTCTCTCCTGCT
CTCGCAATCGCTGCTTCTTTGTCTGTCTTTGGGTCGATCCGAAAGAGAGGAGCTCTTCTGCGCAATC
Sequence ID: 135
Sequence Length: 3135
Sequence Type: DNA
Organism: Poplar sp.
CCATGACAATAATACATCACCATATAATAGGTGATTTGATAATAAAAATTTGAGACTAAAAAGTTTATTT
TTTTTATTGTCTTAGATTTCTTATGGTTACTAATATGATGGCCACTGGAGGCCTACATGGTCATTAACTT
TAGGATCCGTGAGATTAGTCGAGATGCGTGCAAGCTGATCTTGACACCCACGTTAATCTAATAAAAAAAT
AATACATGTATAAATTAGTATTAGACCGGATATATAATATTTTAAGATGTTATTTATGATTTTTTTTTTT
ATGATAAAAACATTGTTAAGCAACCTTCCATGTTGACCGATATTAAATCTTTATCCAGATGATTTCAAGA
GAGCGTCCTCAGTTGATAAAAATCTAATACTTTTATAAAAAATTAATAATTTTTCTTAGATGTTGACTAA
AAATTTTGAATTTTTTTTTCCTTAATCACGAGGACAACCCTAAATTCCCCATTATAAAATTACAACTCCT
GAATAGGAGCTGGAGAAAATTTTGAAATTAACAAGCTAATTATTTAAAATAAATTTTTTTTTTATTTTTC
TTATTATTTAAAATATCACATGGTAACATTTCAACCAGTGACTTCCTCAAAAGATTAAGATTACAGGGTA
TTATCATAATCAAATGCAGGACCACTTATGATCACCATCAAATTCTAAAGTTAATCAATACTCTCGAAGA
TTAGAAGAATAAAACTTGAATTTAAATGCTAGTCAAGACATTGTCACACTCAATATGTATGGACTTTCGT
TGGGATTGAATAATTGCTTTCTCATTCTTAAAAAGTATATTAATAAAAAGAATAATTTAATTCTCAACGT
TACTACTTATATTGGGAGATAGATGTGAGCGATAAAGCTTTCCATAAAATTATTAATCCAATATTATTAT
GGTATAAGTTAAAATAAATGATTTTTTTACTGTTTATCACCTCACAAAATATTATTCATTTTAATAGTTT
TTTGCTTTCTAAATCTATATTTATATTTTTAATTTCATACTTCAATATTTAGTTTACTGAAAATTAAATT
TCATAATTTCCTGTGGTTTGTTTTATATTTGGTTAGATCGGTCTCATAACTAGTGTCACGAGTTTGGCGG
ATTGACTCGAGGTTTTTTTTTTTGTTTTTTTAATTGATAATTTTTTATTTTTCAATTTCATCATTTAAAA
TTAGATTGATTGGGAATTAGGCTTTATGATTTATCTTGATTTGCTTTTTATGAGGTTATCTTGGTGACAT
GACTCAAGTCGCATGTTTGACGGGTTAACCCAATTGACTCGAGTTTTTTTGTCTTTTTAATTGGTATTTT
TTTTTATTTCACCTTTTAATGTTGGGTTGATTATGAATTAAGCTTCGTGATTTATTTTGGTTTGATTTCT
ATGAGGTTATCGCGGTTTTATGACTCGGGTCACACATTTTGTGGGTGAACTCGAGTAGACTCTTGTTGTT
TTATCGTGTCCTGTTTTTAGATTGATTTTTTTTTATTTTCAACATTTAACGATGACTTTATTGAAAATTA
GGCATCATAATTTGTTTTTATTTGATTTTTATAAGGTTATCACAGTCTCATGATCTTAGTCGTGGGTTTG
ACAGATTAATTTGGGTTGACTCGAGTCATTTTTTTGCCTACTTTCTATAAGGCTACCTCGATCTCATGAC
CTGAGTCACGTGTTTGGCAGGTTAACCCGAGTTATATTTTTGTTATTTTTAAAAAAAAATCAATCTCATT
CTTCAACATTGGGTTGATTGGTAATTAAATTTTATAATTTGTTTTGATTTACTTTATATATCATCATGGT
CTTATGATTTAGATCATAAATTTGTTGAATTAACTTAAGTTGACCCAAATAGATTCAATATCTTGTTGTT
TCAATATTATAATTTTTTTAAAATATTGTGTTGAATTTTTGTGAATCAAGCTATGTGTTTTACTGATTTT
TTAAGTTGCTTTTAAATCCAACAAATTGATTATGTCACATCAAGTAAACCTATACACAATTTAAAATATT
TTATTAGAAAAATGTTAGAAATGACTGGATGTTTCTTTCTTATGTTAAAAATAGTTTTTTTGATCACGTG
TTTTGCAGATTAACCAAGATAGACTTATGTTATTTTATTGTGTCCTCTTTTTAGATCGATCTTTTTTTTT
CATTTTCAACCTTCAACAATGAGTTTATTGAAAATTGAGTTTCATAATTTGTTTTTTTATAGGGTTATCA
TAGTGTTATGACCTTGGTCAAGGGTTTGGTATTAATATGGGTTGACCCGAGTTATTTTTTTTATTTACTT
TCTATAAGGTTATCCCAATCTCATGACTTGAGTCATAAGTTTGGCAGATTAACCCGGGTAATATGTTTTT
ATTATTTTTTAATTAATTTTTTTCATTTTTATTTTTTAACATTGGATTTATTGATAATTGAATTTCATAA
TTTATTTTAATTTGCTTTATATGGGGTTATCATGGTCTTATGATCTGGATCATTGAGTTGACTAATTAAC
CTAAAGTTGACCCGAATCAATCTAATATTTTACCATTTCAATATTATTTTTTAAAAAAGATATTGTCTTG
AATTTTTGTGAATCAAACTATATTTTTACTAATTTTTCTAAGATGTTTCTAGATTCATCACGTTGATCAT
GTCATATTAGATTAACTTATATAATTTAAAATCTTTTTATTAGAAAAATATTAGAAATAATTGGATGTTT
CTTTCGCACGTTAAAAATAATTTGATCCGATCCGTGACGCAGCACAGGTGAACAATCTAGTATTAACTAA
TTTGAAAATATCTTCATCACTCTATTCTATTTATTTATTTTTTAAAAAATTAAATATAGGGATGAAATTA
ATCTCAATTAATTAAGAAGCTAATAATTAGAGAAGGGGGACACCGCATAATAAAATAATCCACGGTGGGC
AATCGCGTTGGCTGTCGTCAGCGTAGTTATAACGCAACCTTCTTTTTTTAGCCCACTTTCATTCATCTCT
CTACCCTATATCTCTCTCTCCCCTTCTCTTCCTCTTCACGCATCCTATCCCTCAACCCATAACTACTAGA
AACTTGTCATATCAATCAAAACAGCGGCACCACCACCGCAAAAGCCAGAAACAAA
Sequence ID: 136
Sequence Length: 3278
Sequence Type: DNA
Organism: Poplar sp.
AAAAGTTCATAAATAAAAAAATAATTTAAAACTAAAAAAATAAAAATATTCTAAAAAATACAGTTAAACA
ACAATACTAAATACCACTGACATATCAATTAAAATTAAATCTTATTTTTTAAAAATATACTTTATACGTC
CGTGTCATAAATTTAGAATATTTTATAATTTCTTCTAACAATGATTGTAGTCTTCTTTTTTAAAAGTTTT
TTTTTTCTTTTTTTACAAGAAAGCAACACAGCTGAAGGGGGCATGAGCTGGCATTTTAAAAAAGGATAAC
AAGCGTCTAATTGTCGTTGGATACACGTTCTTTATCCCTGTTGTCGAGCTGGAGCACATCATTGATATTT
ATTTACATCAGAGGAATATCAATGGAGCCACCAGAAATATGTCAAATTTATTGATTAATTATAGCTCAGT
CCTTGTAGTTTATAAAAACTAATCAATTACTCCTCGTACTTTTAGAAATTATACATTTAATTCTCATGTT
TTCTTTTAGACATTCTTGAAGGGGAAAAAAATGAACTGATTTGGTAAATGTTGATAATTAGATTATTTAA
TTATTTCTACTACTATAGAGACCAATTAACTAGTTTTAATAAACTATAGTTATTAAGTTATAATGACTCT
TAAAGCTATGAATAAAATTTAAATGAGTGAGTTATAACCTTATCCTTATATATTTTTCAAACAAATCATT
CAATACATGTAATTTTTAAAATAATTAATTAATCATTTCACCATATTTGATTGTCATGTCAGGGATAATA
ATAGAAAAGTCGATGTCAACATAAGGCGAGCATTAAGTTATTCAAATTCAGCTTCAATAAATTCATTTTA
GTTTTTTAGGTGAAAAACATTCTCTCAACCAAATTGTGGTTCGAATTTTTAATCGCTTGAAAAAAATAGA
ATGCAAACTTTTTTGTATGAATGCTATGATTATTGGTAATTTTTATCATCTTTCATGTTTGTCTGATAAA
AAAATAAAAAAAAATATAATGATATCCCAAAAAATCAAAGTAGTTTTAAAACAAGGTTTATATGTTAGTA
ATTCGTTAATATTTTGGTTTTCACAATATGATTCATTCTTTCTAACTAAGAAGGTTGATGATTGATGGTT
GATATCTAATTAATACTTGTAAAAGATCTCCAATAATAAATTTAGAAACTCTCTAATAATTAAATAAGTG
TTTTATGGAGAGAAAAGATAATGATATTTTTTAGAGAGATTCTAAAAATAAATATGTAATTAAGAATGGA
AATTGAGAACCTAGTTCATTTAAAATAATTATTTAATTAAATACTTATTTTATAAACTCTTCGATACTTA
AATAAGTATTTTCCTGAGAGAGAAAACAATGATATTTTTTAGAGAGATTTTAGAAATAAATATGCAGTCG
ATAATGAAGATCGAGAACCTAATTACTTTAAGAATCCAATAAGTCTTTATAGCCCATGCTCCCTGTCATT
TGGTGCTAAAACATCTCTCATGTGTCAAAAAGAAAAAAAAATTCTGACTTATCAAGGAAAAAATATTTCT
AACTCATCAAATGAGGGATTTTTTGATTTATTAGAGGAAAAATATCTCTCTAATTTGTTAAAATCTCATA
TTCCAACAAAGAGTCTGATAAGATTGCCAAAGACATTTGTACCTGAACTCAATGCTTGACTGAGATAAAG
GGTAATGAATTTGGCAACTCACAAAACTTGTATATGTGTAGGCTTAATTTTTGACCGGGCCCGAGGATAT
TGGGTTATTATCCTGCCTTTAATTCATTTAAAAATATATTCAAATAAAAATAAAATATGCTGATATATCA
AATTTATTTCAAAGTTCCAAGCGGTAACATCAAATATCTATGGATCCTAAACATCAAAGTAATATGATGG
ATCCATATATCATAATGAAAATTTAATTTATTTAGAAACCATTTCCAAAAAACAAAAAAAAAGAAGGTGA
AAGACTAAATAAAAGGTTAACTCAATATCAAGATAAAAAAGAAAAAGAAATGGGATGTGATTTTTTTTTT
GTGTATATTGATATTTAGAGTTTATTTAGTAGTATGGTTATCCTGTATTTTGTTTTATTCATGATCTTGA
AAGTATCTTATTAATCAAAATCTATTATAGTTTTACATGAATTCTATTAAAAATTCTATTATAAAACTTT
ATTATAGAAACAGCTTTTTTTTAAATTTAATTTTTTAAATCACAATGATAGAAGTTACTACAACGCTCAA
ACAATGATGATGATTGTTGTAGGCTGGCGGTTGAGATGATGAATATACATGTGTTAATTTGTTGATGAGC
GAGGAATTAATCCTCTCAAAAAACCGTAATTTAGAGAAGCATGGGAAATATGCACGATTTAATTGGGCTT
ATTTAAGTTTTGCAGGGCTTCTTAAGAACTCGTTTGGAAACGCGGTTGAAACCGCGTTCCCATAAAATTT
AAATTTTTTTTGTTATAATTTAATATAATTTATATGTTTTGGATCGTTTTGATGTGCTGATATTAAAAAT
AATTTTTAAAAAATAAAAAAAAACATTTGTATACATTTCGGCACGAAAAGTTATTTGAAAAGCAATCGCT
ACCACACTGCCAAACACACTCTAAAAGTCAGCTATGCACATGTATATTTCTATTATTATTATATTATTAT
TATATACAAAAACATATCAGCATATATGTTTTGGTTTTCTATTGAAATGATCCACAATTTTGGGCAATTG
AACCAAACTAAAACTATTTTAGATAAGAAAAAAAATTCAAAATTTAATTCAAGATAAAAAAACAAATAAT
TAGATGTGTAAAACACATGTTTTGAGCAATTAAACCAAAAAAAAAACTAAAAATATTTTAGATTAGTAAA
AAATCCAAAATTTAATTCAAGAAAAAAAACAAATAATTATTTCATCTCAGAAAATACATATAGGGATTAG
TTCATCTCAGAAAAAGAATATATAGGGATTAGTTAATTATTTTTTAAAAATTTAGCAACTAAATTATTTA
TGTCTTGAGAATACAAGAACTAAATTATAATTTACCCAACTTAAAATTCTGATTCCATCAACCGAGAGAG
AAAAGAGAGTAGAGAGAGAGAGAGACGCAAAACATAGAGAAGCAGCAGTCCTCCATTTTCTCTCAAAAAG
TAAAAGCCTGCGTTGAATAGAAGAAAGCAAGACCCAACAATCTCTCTGTCTCTATAAAATCTTGTTCTAC
CCTTGTCTTGCCTTTGTTATTCTTGCCTCGACCGATCCCTATAAGAAGAAGCACAATC
Sequence ID: 137
Sequence Length: 1252
Sequence Type: DNA
Organism: Poplar sp.
CGAAATCTATCCAACAAGGACTATATTTTTCATGGTTTCTTAAGCGCGCAACAACAAAAACTGAATCTTTTGTT
ACGTCATCAAGTGATCTCCTTTTAATTTTTTGAATAGAACACAATTAAAATAAAAATAAAAACTGAATTTTTTT
TAACTGGGCCGGACCCGACAATAACATAATTGGAATTGCGATCAAATTTCACAAATGCTACATCATTATAATTT
TTAAAAAAACAAAAAAAATTAAACTCATTTTCATGGTTTTTCAAAAAAAAAAAAACTATTCACGTGATTTTAAA
TTTAAAATAATTTTTAAAAATATATATTAATATTGATGATTTTAAATTTAAATATTGTAGAATTAATTACTCCT
ATTACATCATGAAATAAATAATACTTTATATAAAATATTATTTATTATTCCATTAAACTATTTATAATTCCATT
ACGTACAAAATTCATCCGATAAGGACTATAGGTTCCATGGTTTTTTGAGCGTGTAATAAAATCAGGTAAAATAT
CATCAGAAACAAAATTAGAATTGCGATCAAATTTCACAAATACTCCTCATCATGCGATACTCTTTTAATTTATG
TAGTGTTATTAAATAATATTAAATATTAGTTTTTTTAGTAAAACATAATTTTAAAAAAATTAATTTTTTTTATC
GGATCAGACGCGGCCTAATAAATTTTGCTTATGTGAATAGTGAAAAAAAATTCACCTTGAACAGTGCCAGATGA
ATGCTTCTCTTCACCTTCTCGCATTGCAGGTGAATTATCACCTTGGCACTGTTCACTTTTTGAGTGAACAGTGC
CCAGGTGAATTTAATTCACCTGNCATCACTTGGNATGGGCACTGTTATGAACAGTGCCCAGATAAATAAAGAGA
AGCAGCCGGAGAGAAGCAGCTCCCAGCTGCTTTTGCAAAACCATGGTTTGATGGGAAAAATTGTGGGGCCCATC
AAATGAAAATCTGCTTTTCTTGCGTTACCAAACACTTGGTTTACGCGGTTAGCTTTAAAAGCAGAAGCTACCGC
GTAAACAAACACCCACTTAGTCAACCTGAAGTAAATTAGTGCTTCCTTAATTTATGCAGAAAAGAAAAAAAACA
CAGCACACCAGCTCGACTTCATTCCAATGGCTTCGTCTCCAACTCTCCCTCAAGATTCAACCCCAGACCCAAAT
ACTCTCTCACAAAACCCTAACAACGCAAACCCAGATCAAATTCAACACATTACCTGATGATGATGATG
Sequence ID: 138
Sequence Length: 3250
Sequence Type: DNA
Organism: Poplar sp.
TCTACATTATACTATACTTTAAAATAAAAACACTTGGCTAATTAAACTAGTCTAATAATTATATGTTTGT
GTCCTTTAAAGATATTGAAAATTTACATTATTATTAATTTTAGAACATATCATATTAATTAAAATACATG
TAAATTTATCTAAATATTCACATTAATAATAATAATAATAATAATAAAAATCATTATACATGTAACTTGG
AGAAAAATTCATTATATTATAAATATAAAGTGTTTTTACTTTAAATAATTTAGCATCATTAGAGCATTAT
TTTTGTTGTTTTTTAATTAAAAAAAACTGTAGGGGCATTGTTGGGTCTGGTTTGACAGCTAGGCCCAACA
CTATTAGGTCTGGCTGAGCCGTCAAATATTTTCAATTTTATTTTTTTATCTCTTTAGATTTTTTCTTTGC
TCTTATTTAATTTTTTTTCATTCGATAAAGAAAAAATAAATTAATAATATTTTTTTTATATTATATAAAA
GTTGAATAATGATAATTTTTTTTATTTAAGATTGAGTTGGGTTGCAATTCTTTTTTTTTAGCGGTTATGC
TGCCACCAGGATTTAATAGTGTTGGGTCCAACTTCCAGTAGGATTTTATAGCATTGAGTTCGGTTGTCTA
GACTCAACAACTTTTAAACTTCTTGATTGTTAGGTCCAATGCTATCGGGTCGTATGATTTGACCACTAAA
TCTAATAATATTGGATCTGACATTACCATCAGACATAAAATACATAATATATTTTATATACACTTCATAT
TTTTTTATATTTTAAAAAAATTATTAATGATCCGTTGATAAGTATGGGAAAATATTCTAGTGTGTATGTA
TATTTATATAACCTGAAAGTTTAAAGGTGTTAAACTGTTTTTATTACTAGTTGGTGGTTTTGATTGGAGA
TCGAGCTGCAGAGATCAGCAATGTAGACTAAGTCCTCGTTTATTGTATGGAAAGTAATTTTTAGAAATTA
TTTTTAAATTGTTTTTGTTTAATAAATAAAAAATATTTTTAAATAGAATATACTTTTCAAAAATTATAAA
AAATTGAAAAATATCTTCAAAGTGCAAATACTGTCTAGATAACCAGTTCCGTCTCAGGTAGACCCCTCAA
GCCACCAAGTGAACAAGAGAAATTGTGAGGGAAACAAGAAATAAAGTTAAACAAGAACTGACATGATTAA
AGTTCAGATTAAAAGATTTTTTATTTGTCGTTTACTTGATCTAATGTGGAAAGTGGAAATGGAGATAGTA
GATAGACTCCCCCGCATTAATGTATCTATCCTCATATAAAGTATGAATAATTAAAATATTTAAAAATATA
TTAAAATAATATTTTTTAAAAATTATTTTTGATATTAAAAAATTAAAACAATTTAAAAATAAAAAAAAAC
ATTAATTTTAAATAAAAAAAACTCAAACACTATTTAAAAAACGTTTTACACGCATCTAAACTTTTTTTAT
CACTTAATTTTTATTTATTTATTTTATTTAAAAAATTTATGAAATTAGATTTTATTTTTATTAATTTTAT
TATCTTTCGATCTTTTTATTTGTTAAATTTGATTTTTATTTTTTATTATTATTTTTTATTTTATTTAAAA
TAATTTATGAAATTGATATTTGTTTTTCAATTTTATCCTCCAACTTTTTTATATATTAGATTTTGTCCTT
ATTTTTTTAATAAAATTCAAAACAAATTAATAAATTATTTTTAGCTCATTTTTTCATGACATAATCAAAT
ATTAAAAAATATTTTTTAATTTTTTTAAATATTAAAAAATAATTAATTTTTTATAAAAACTACTTACGAA
AAGTAAATTATTCTCCAGCAAACAAGTTCGACAAGCAAACGGTATCCGAGAAAACCTCTGTAGTTTTGTC
TTGGCTTCTCTTAACATTCTTTCTACCCCTTCTACAACGATATTTTCATAATTAAACTAAGAAATAAGTG
AAGACTTCACTCCCTTTTCATGACATGTATGGGGTTTTTTTTTTTTTTTTGCATGAGTGTGTTCTAGTTT
AAGATATATTTTTTGCACCCCTGGCCAATACGCCCACTCCCCGATCAGTTGATATCATATGCATTATTGA
ATTATATTGCAATATCTTTAAACTACGCTAGAAATTAAATAATTGACTTTTTGATTAATATCAATATCAA
GAGGCCATGAGTGGATGTGAGTAAAATCAGGAGAAAGCGATGCAGACAAATTGCGAATCCCTCAAAGTTC
AAAAAAATCCATGTTGGTTTCAAAAAAGTCCGAATTATTTTTATAAATCATCATCCTTATAATAGAAGAA
CTTACATTTTAGTAATATATGCCGTAATTGTTTTCTATACATCACATTCCTTATACTAGAAAAACTAACA
ATTTAGCACATAATACATAACATATTAAATTTTTTTAATATGTTTGAATACTTTTTTATTTCAACGTATT
CATTCCCTCATCCCCAAAGTAAATTATTTTAGTTTCAAGAATAATATAAAAGTATTCTTATAAATCTGGT
TCATCTGCGTTCTTAACATGATAGCCGGTTAGAAATTCAAATTTATTCTCTGTAAGTGAATGAGTAAATT
AATTATAAGGTAAAAGTGCCTCAGTGAATGACTCCATATCCCTTTTTTTTTCATGCTTTCAAGAAGAGAC
ATCTGGTTCTGGTATTGCCACGACGAAGTATTACTGCTGAATGGCAGAAGAAAACAAACTCGAGTCTTGA
TGTAGATAACGCTATCGGTGAGAAATCTTGCTGTGGATAAAGTTGTCGGTGAGAAATCTCGAAGTAGATA
AAGTTGTCGGTAGGGTTTTCTGTGTGCGATTGAAAATATTTTTTAATCACTTCGAAGTGATTGTTCGGCA
ACAAATGTGCATTGTAATCGTTTTTGCTATTACAGTTTATTTTTTAAAAAATATTTTAGTTTTATTTTTA
GTTAAAAAAGATAGATTTTCACATATAGAATAAATTATAGACAATTTTATACGTGGTTCAATATAAAAAT
AAAAAACTATTTAGTTTACCAGATGTTTTTTTTATTAGATATAAAGTAGAAATTATGGCAATGGCAAACG
GTATGTAAAAATCCCTGGATTTTTACCATTGATCACGTGACATGCATCTTGTTGAGTAGTATAAATACTC
TTGAGGGAACCCAATCAATTTCAAGTTGAAGAAGTGCTAGATACTAGTAGTAGTTGCAGACAAAGAGCTA
GTGTTAGACAGGTTCTTGTTAGACAGAGAG
Sequence ID: 139
Sequence Length: 3055
Sequence Type: DNA
Organism: Poplar sp.
GAGGAACTATATCCAAAGAACACACATGGAGAGGAACGAAAATCCAATTTATGATTATTATATGGACGCA
GAAAAGGAAAACAGAGACACCCAAAAGTACGCAGAAAATGATAATCAGGAGACCGGTGAAATAAACAATC
AAACAGAGAGCAATGTGCAAGAACAGGAGTAGACATGCGATTTATAAGATAAACAGAGGTTTCAAAAGCA
TAATTCCAAAATCGAAAAGGTGTTTTACATTGCCCTAAAAGAGTAAGACCTGTTTCCACAATATGCCTAT
GACGTCGCTCTACTGTGCCATTTTATTCATGAGTGTGAGGACAAATCAAACGATGATGAATACCAACAGT
CTAAAAAAATATGGATAATTTTCGGTATTCACCGCCCCAATCAGTTTGAACATATTTTATTTTTAATGAA
AATTGACGTTCAACGAGAGTCTAAAATTGATGAAAAACAGAGTAAACATCAGACTTGGCAACGAGAGGAT
AATACCATACATATTTAGTATAAGCATCAACAAAGATAACAAAATAACGATAGCCATCTGAAGAAAAAAG
AGGAGCAGGAGTTTTGTGACCCGTAGGTCCTAAAGACAAACGTGATGATTTTCCTAAAGGACAACTTTGA
CATTGAAAATTAAGACTTTTGTTGTTACAAATGATCTTATTTTTTGAGATTAACAATTGAAAAATACGTG
TAGTAGGATGACCTAGTCGACGATGCCATAAATCGGCAGAGACGGAAGTGCAGGGAGACCAATAGGCTTG
AGGAACTGACGTGACGGAAGACTTGGTAAGGGCATAGAGGATTTCATGGGTGTTGAGATCCTTGACATAA
AACACACGAGGGTGAAATTCAAAATAAACATTATTATCAAGATAAAATTTCTGAACAGAGAGCAAAGGTT
TCGTAATTGTAGGAACATGAAGAACATTAGATAAGGTGAAAGAACGATGTGGTGTATATATTTTTGTATG
ACCGAGATGAGATATAGGGAGGCCCTTACCATCACCAACATGCAAATTATCATTACCAAGATACGGTTCT
GAAGCAGTCAAGGTGGCAAGATCAGGTGTGACGTGTTGATTGGCACCGGTATCCGGAAACCAATCAACAG
AACCGGTTGAGGAGAGATTGCGCTACACCAGATTGGCAGTAGGTTGTTGGCCATAACCTCGCTGCTGGAA
TTGAGGGCAATGGGGAGTTGTATGGCCGAAATTCTGACATAGTTGGCAGCGTGGATTCTACCCCCTATTG
CGCTGCCAAGAGCCCTGCCTATTGTCACCGAAGGAGGAGTTTTGGAAGCTGCGGTGATCAGGTCTAGAGC
CAGCAAATCGGTTGCCTCTGCTGTTGGACTGGTTGGGACGCCAGCCACCGTTGAAGCGGCCCCTGCTGCG
GCCAGAATTGACAAAAGTCTGGCACTGCGCAACAAAAGCAGAAGATGGAATGCTGGGTGTGGGCAGCAGA
GGAGCATGTATGGCAGCATAAGATTTGTGAAGAAATTCATGTGTGAGGAGATGGCTGTGAAGATCTGCAT
ATGATAAAGGTTTAGCCTTGGTAATAAGACTGGTAACTAAGTCTTTAAACTCTCCCCGAAGACCACGAAA
CACATATAAATTGAAATCTTCAAGTGAAACTGGCCGACCAGCAGCGGCCAATTCATCAAATAAGGCCTTC
GCTTTTTGCATAAATTGAGTTACTGATTCATCACCCTGTTGAAGATCCTGAAGAGAGCTGTCAAGTTGCA
TAATATGAGAGTTGGAGGTACAAGCGAGAGCTCGCTTAAGAGTGCCCCAAGCTGAACAAGAACTTTGACA
GCCAACAACAAGATGCAAAACTTCCATAGATAGGGAGGAAAGAAGAGCACTTAGAATGAGTTGGTCCTGT
TGTTTCCAGTTTTGAAAAAGCGGATTTACCTGAAGAGAGATACCATCATGGGCAAAAACATGTGTTGATG
GACATGTGTTGGAGCCATCAACAAAACCAAAAACTCCTTGGCCTAGGAGATAAGGCATCATCTGCATACG
CCAATATAAATAATTGGTGTTTGTTAATTTGAGGGAGATGACTTGATGAGTGTGAGAAAGGGAGATAATG
CTTGCGGCAGTAGAGGCAGCAGAGGCAACAGACGTGGGCTGCAAGAGGAGGCGTTCACCAGCCATGGCAG
AGGAGAATCCAGGCGGTGACGCAGCAGAGGAAAGCACAGGAGGCGCTGCCAGAAAAGAGGGCTGCACTGT
TGGAGAAGAAGAAAGCTGGACTGCTGGTGCTGCAGAATTTGAAGATGTATGTGGCGGCTGTTCCATTGAA
GAAGGGAGGCTGGGAGGCTGTGAGAAAAGTAGGTTTAATTTATTTTAGGGTTTTGTGGCTCTGATACCAA
GTTGAGAATAATGAAATGTGTTAGGTTGTGCCTTAGCCAACCTTCCTATTTATATAGAGGCAGCAGAACA
CTGCAGTAACTGTAATGATTACAACATCCTATATTAATTTCCTATTCTGATAGATACATGATATACATTC
TATAATAAATTTGTTGTTTTTTTTTCTTCAACTTTACATCATTCTTTAAATAGAAAAGCTCAATTAAATT
TTTATTAATTATCCACTCACCATATTTCATTCAAGGTAATTTCTAGTAAGTGTTCACTCATATTATTTCT
TTTATTATTTTAAATATCTTGCACTAAGTAGACTCGTTTTACTGTTCTTTTAACACCAATGTAAGTATCA
TTTACCCAATAACAGTGGGAGTTTTTTTTTAAAAAATACGATGTCAAGTTCTTAAAGTGGCTTAGGAAAG
AGTAAAACTGACTATGGTGTCAAGTTTGACAAGTTTTCCGAGAACCTAGCTTGCAATACTCGAAGACAAA
GTTATGAGAGAGGTATTGAAACATCAAACGGCATCCATGATAGGTCCATAATACAGGGCTTTCATGTAAT
TGCATTAAAATAAGCTTTGATTGATTTCTATATAAAGGTACATGAGGAGCACCCCAATAACACAAAGCAG
TTGCATTTCTAAAGTACTATCCGTCTGCTCAATCCACTTCACACA
Sequence ID: 140
Sequence Length: 3146
Sequence Type: DNA
Organism: Poplar sp.
Other information: n = A, T, C, or G
TTTGAATTTAATCTTTCCGCCATGATTTTAAATTTAATTTCATCCAATTATGTTATAAAAGAAAATTAAA
GTTGAAGGATAAAAATTAAAAAAAAAATGATCGAAAAAAAAAAGTTGGGAAGTATTATACTATTTATATA
ACCAGTGAAGCAATCGTATTAAGCCCTGTTTTTTTTTTTAGTTTTGTAGTTAATTATTTTTACGTGCCGA
CAAGTACATCCTTTGAATGGCTATTCATTAATTTGTAGTCAAAGTCCGAGAAAAATACATATGATCTATC
AAAACCAAACAATAGTGCTCTAAACTTGTTCGTTTTTCCTGTGAGGCTGTGTGCATTTACTTCCTCCTAA
ATCCATGTTATTTTTGTTTTTATATTTTGAAAATGTTTTTGAAAAAAATTAAATTGTTTTTATTTTTATA
TTTTAAATTAATAATTGTTTAATATTTTAGATTATTTTGATGTAATAATATCAAAAATAATTTTTTTAAA
AAATAAAAAATACTTTTAAATATAACAATTACCACAATTCCAAAACGCCTCTAAATCAGGCTTCGGTTTC
GAAATCTTATCCAAGATTTATGTCTGATACAAAGAATACTGTTCAAGTCACATCGCTCTATAAACGAGTT
AAAGACGACAGAGTCTAGCTCATATATATATATATATATATATATATATATATAGTAGACAAATCACAAT
CGAGAAATTAGTATTAGTTGCAAATCGTAAATGTTTCGAGCAGTAACCGACATAGCATAGTTTGATGAAA
TAAACTTTGACCTGAATGGTTTTTTTCTTAAAATAATATCATAGTCAATTACTTATATATTTACATGTCA
AAAATCTCCCATCGCTTCTGAGAGGAGGTGTTTGATATAATTAATTTTTATTTCTGTTTTTAAATATTTT
TTTAAAATATTTTTGGTTTGAAAAATTATTAAATTATTTATTTAAAAAAAAAACTATATTAAAAAATACT
TTACACTAAAATCTCAAACAGCATGAAGATGGAATTAAAATGCCATGTAAATATAGCATTGATATTAGAC
AAAAATAGGTTGGATTGGAAGAACATGTCTCCTTATCTTTTTTTCATTTTAAAATGACAGTTTCATTAAA
AATCTGTCCTAAAAACATATCTATTTTTATACTTTTGTTTACGTTTCCACGACAAAATATGTTTTATATA
TATATAAAGATAATAACCAATCATAACTAAAAAATAAACAATTTGCCCCGGTGGTTTCGTTTTCTTTTCT
TTTCTTTTCTAATTGTTTTTGGTGATATGAAACTAACTGGCCTCATATACCTTGCCAGTGAGGATTAAAT
ATTTTTTTGTAAAAAGACATACGCGATTGTCTGGTTGGAAGGTGACTGTGAAGCTGATTTGATGAACTAT
AAAAAACGAGAAAGTGAGATTTTTGCGTATTTTATTTCACCTCTCAATAAATAAGCCATTCTTAGGAGCC
GTGCTTTTCTTTTATTATTAAAAACTATTGTCCAAAATGTACCTTAATCCCATCCTAAATCACTCGCCTA
GGAACAATTATTAAAGCACCTTCACTATCTAACTAATTCCCATGGTGGTCCATTACTATCTCGAAGAAAA
ACAAACCGGTAACATGAAAGATATAGCTGAATTAGTTAGATTTTCTTAAAAAATTATCAGGTTGAGTCTT
TTAAATTTCAGAAATACTAGAAATTTACATGATTATTAATTTTAGGATAATGAGAGATTAATCGAGGTAT
ATGTAAGTTGATCCGGATATCTATAATTAATAAATAAATAAAAACACATTTGTGCATGATATTCGAGGCT
CCTACCAAATTAATGTAATTCGTGCGTGCTGGCATCAGGTGCATGAACACAGTACACCTGTGTTCCATGA
TCTCGAACNNNNNNNNNNNNNNNNNNNNNNNNNNNNNNNNNNNNNNNNNNNNNNNNNNTGTCATTTCTTT
ATATTTCTTTCATAAATAGAATCGGTAAAACGAGTGAGGCTAACCAAGATTGGGCTCTCAGCTGGTCAGA
AACTTAAGTTTTGTGCTGGTTAAATTAAAACCTAGCTATGACCTCCCATGGACGTCGATAGTTTGGCTCC
ATTCAGCACGGGACAGCTTCTCTTTCAGGAGTACAGATTTTTGCTAGGGCACCCAAAAGATTGGACTTCA
ACAAAAGAACCGGGAGTTTGGCACGAGACCATAATGATGACATAGATTGACGCACGGCTTGTTATGTGAT
TTCAAATTAGGTCTAAAAAAATATCGTTTAATAATTTTTTTTTCATATTTTTTCTTTAAATTTTTCTTTA
GTTTAGATTCTATTAATTAGATCTATTTTAATTAACGATTATTTGAACAAGTTTATATATTATTTTTCAT
GACAGTTAAAAATTATTAACATTCAAAATTTATCAAATCATAATATTACAATTTTAAAAATTAAAAAATC
TGAATTTCTTAATTTGTGATTGTGTCGGATGTTAAGCCATATATATCTCTAATTTACTCCAAATAAATCG
TTTATGTGGCTGCTTCCAAGCTTTGTCTCTTCAATCCTCCAGTTGTTAGTCTGCTATCTTGTGGAATTTT
CAGAATAGAAATAATTATATCACAAATATATCTAAAATCACATTAAACGCGAGCCTCTCGATTATTTTCC
TTGTTCCATTACCCATATTTTAGTCTTTCACGCATTCTCAATCTTCATCCCAGCTTTGATTTCCTTTTCA
CCTTTTTTGATGCTGAAAGATGTGCCACATCTCCGAGTACAATAATTGGAGAAGGCAAAAGTAGCATACA
CCAGCAGGGCCATTGATAGTAAGAGCATCCACTAAGGAATCACAAGAGTTCTTACGACCCTTTCCTCGTT
CATCCCAGATGATTCCGAGGGCTCTGCTCCACTCGTACGTTCCTAAAAACTCAATACTGACCGTATACTT
ATATACTACCTTTTTTCCCCTGCGTAAAATAGGAATAATACTTCGAGAATATTTGACCCTTCCATAAACC
TACCTCGGCCTCTTTATTCATTACTACCATCATATGGCTATAAATACCAAGGCCCTTTCTCTTTGGTTTG
CACGCCAAGGTTTAAGGTTTCAATTTGAGACAGTGAGCTCCGTTGCAGTACTTGTGTTCTCTAGCA
Sequence ID: 141
Sequence Length: 3923
Sequence Type: DNA
Organism: Poplar sp.
AAAAATAACGTAAATTATATGATTTCAATGCCTTAATTTTTTCCAAATTCAATTTTAATACAAAAGTTTA
TTTTTGTTATTTTTTAGTCACTAGTTGAGAGAGGTGAGAGAAAGGTCGTTAAGTTTCGGCGATAGAAAGA
GAAAAATATCGTTAATACTGATTTAAACTATCAAAACAGTTGATATTTATGTCAAATGGTTCTATTTGAC
GAGAGGAGTTTATATGAAGTGTTTTTAACCTTTAAAGTTCATGAAAACGCTGATATGAGCTTGATTTTTT
TTTTTGATGAATTTTTAGTTTTTTTAGGCTATTGATAGGTTTATCACAATTTATATGGTGTTTTTGTGTC
AAAATGGGTTGAAAAATGAGGTTTGGGTAAAAAAACATAAGCTCTGATTTTTCGACCACTACAATGGCAA
GAATCTAGGCAAATCATATGACGCATTGTTTGCTTCAGTAGGCGACATGTTATTTGAATTTTTTTTTTTA
AATTAGACAACATATTGTCCACCCCAATTGCAATGAAAAAAAATAAGGGCCTAATCGCACAGGCCTTGAT
GAAATAGGCCAGGCCTAGCAGCGCTTTTTTCTTTCTAATTTTTCTTTCTATTTTTTTAAATTAATGCTTT
TTTATATGGTTTTTTTTCTCTAAATGTTTTTTTATTTATATTTAGATTAATATCTATTCTCTCTTTTATT
TTGTTTAGAGTGTCTTTTTTAAACGACGATTATTTTTTTGTTATACATTTAAATTTTAAAGTTTTTTTTT
CTGATTCATTTATAATTTTTTTTTAATCTTTTGTATAGATGAATTTTATTTTTGAAAATAAAAAAAAATT
ATTTTTAGATAATATTTATAATATGTGAACCTTGCATAGTGTTTTTTTCCTTTTTATTATATTCAATCAA
TTTATTTTTTGTTTCTATTTCTATTATCTTTTGCTTAAATAAAACATTATTTTATAAATAAATTTAGCTA
ACACAACTGGGAAAATATCCTGGCTTGTGAGATTAAATATCTTGAACTACATTTATCTCTTAATTTTTTC
ATTTTTATTTTTGGTTATCATTTTTTGTTTTTTTTTTTCATTTATTAACACACATAGTTCTCGATTTATT
TGATTATAGGTATGTATAAACTTTTTGATTTTCACTTAAAATTTTCTTAATTGCTAAAATGTGTTGAAAA
AACCCGTGTATATAATTTTTTATTTGAAAAAAAAATATTTGACCTGCGGCAAAGCACGAGTTGAGTATCT
AGTTGTATGTTAAGATCACGTTGAAATTTAGTAATGCCTCATGAGAAGGGTTAACTTCTTCTCCTTGCTT
CTTATACTTTATTTATTTTTCTATAAATTACTAGAGTTATCCCTTGATGATAAGTCTCTCTATCTTTTTT
TTTAAGTGTATAACATTCCTCAGTCATGTCCCTTTATCTTTATGAAAAAAAAATATTTTTAGAATTTGTT
TACCAACATCTCTTTTTATTGGTGATGGATACTGGACAAAGTCTTTTCCTTTGATAGTTGTTAGTACCTT
AGTTTTGGTGGTATTTGAAGGATTGATTATTAATTCATGATATATCAACCTAATTCATACTAGACTTTTA
GGTTTGCCTTTGAATACACGAGAGGTGACAGGAGGTCGCTTGTGTTTTGGAGACTTATCTCTTTGTTTAT
AAAAACATAGGTACTTTTATCTAGCTGCATTTGTTTCTTTCATCAAAATATGATTTTTTTATTACTAGTT
GATTTTGAGAAGAGATTTATCTAAGAGAGCATATAATCTTTCCCATAAGAAATAGTTATGGATTCCTCTA
ATTAGAGCCTTTGTAGCAATCGGTTCAAACAAGTATTTTACTTTGAGCATCTCCTTACTGAATCTTTTTA
AATATATCATGATGCTTTCTTCTTCTCATTGAGTAATGGTGAAAAGCTTAGTTTAACTTTTTTTGACAGA
TATACTTGTATTAAAATAATCAATCAACTTCGTATATAAGTTGAAGAAGTTGAGTATAGAACTAGATTCA
AAACTATATAATTGAATTTAAAATGCCAGTACAGACAAATGTATTTTGATTATAGTTTACTTAGCTTGTA
CTGATTTGTTTTATACATTTATCTAAATGCATCTAAATATTTCATTTCCAAATGATATCAAACATCTATT
TACATGCCTAAGAAGTAAAAAATTATTACCTTATAATAATGTGATTGATATAACTAATTAAAAATTCATC
ATTTATTGGTGCATATACAAAAAAAACATAATACAAATACAATATTAATTAGATAAATTATTTAATCATA
GTTATTATTAAGTTCACTCTATTTTACTATTTCTTTTCGCTAATATAAAATTTACCATACATAACCAAAA
GAAATTACTATCAAATTAACCACAACAAGAAACACTATAATTAGACTTGACTTGCCCTTATAAGTTGACT
TAGAAAATCCATGATTGAAGTCTGACCCGAAAAATACATTGACATGATAAAACTTAGTTAATCTGGTCGG
GTCGGTTCATGACCTGGTTGATTTAGCCAAATCTAATTAGGTCAACTCCATATTTATTTTAATAATAATA
ATAATAATATTATTATTTTAGTAAAAATAATTGACTTATTAACATGTGAACCGAGGCTTCTTTGCTAATT
AGCATGTATTATATCAACATAATAATAAAAAAAATACAACCACAAGAATAAACTAATTAAAGAGAAAAAA
CAAATTAGCCAATTCCATAATGGGATCACAAGATCTACCATTACCAAACTATACCTACGTGCCTCACCAC
ACACAAATAGCGCGTGGATGGCAAGACATTTTGAAAAAAAAAAAAAAAAAAAACCAGCAGTAATATACCT
TGAAAATTAAACTAATAGAAGAAAAGAAAAGAGAAACACATCTCACAGATGTACCAAGTTGCAGAGAGGA
GCAGTTCCCTCCCTCTATAAATAACCAAAAGCTCAAACACCGTTCTTCGTGTCAAGCTCTCCTCTCTCTG
TCTCTCTCTCTCTCTGTTATATTAACAAAGGAAGGAAGGAACAAGTCTCATCACCTTTCCTGTTCTATCT
CCGTAAGGTAAGGCGGTTCCTTTTATTTCTCCTCTTCCTTCATTTCCCATGCAATTATAATCCAACAACA
ATAAGCACCTGACAGCCCCCTATTGCTTTCCTTTCCCCCCTCTTCCTCTTGCGTTTCTTTCTTTCTCTTT
AAACGTAAGTTTCAATTGAAACAAAGCGTAAGTAGTATACAAGATCTGCTTTTACTGATTTGTTTCATGC
AAATATGTTTTTTTGTGTTTTCTCTCATGCCCATTTAGACTTTAACGATGTTTGAAGTGCCTGATTTTTT
CCCCTGTCGTTCTGGGATTCGTTGATCTCATTCTGATTCAATCTTTTACTTTATTGCATTGGATCTGATT
TGAAGTAGTAAGTGGTTTTTTTTGGTAGTGGTGTTTAAGAAGAAAAGTGAGAATGAATGCACGATACATG
GGTTATGCTTATTGTCGATAGAGCAAATGATAAAAACAGACAACAAGTTATGAAGTTTCAATCTTAGAGG
AAACCATTCCTTAATTCACGTATTAGAAGTTGATTGCATTTTGGGTTTCATTTCTTTGTTGTGTTTCTCA
ACATTTGTTGAGTGTTAGATCTGTATTTATTGTTTGCTACTAGTGACTGCCTGTCTTGTTCAAAGTAGCT
GAAATTTGTTCCAATTGAAAACTGTTTTCTATATAATGAACAAAGTAGCGGAAATTTGTTCTAATTGGAA
ATCGTTTTCTATGTAATGGACCGGATTAGTTTTTGCAGCTTAATTGTTATTTTAGAGCTTAATTTTGATA
GATCTATGAAAGTTGAATGTTTGGATCAAGAAAAACTGAATCTTGATTTTGGTGTGGCATAAGAAGCAGA
AAA
Sequence ID: 142
Sequence Length: 3115
Sequence Type: DNA
Organism: Poplar sp.
CTATTTATTGGCTGCAACAATTACTGCCAGTTTTAGGCAACAGCTTAAAGGAAAAACTGCTGCATTCTGT
CTTGAAATTTAGTCCATGAAATTGTACTACACCACCACCACCACCACCAGTCATTAACTTACTTGTATAC
TTAGTGTTGTGTTTGGCAATAATATAGCTGATTGTTATTTTGATAAAATTTAATTTTTTTGTTTTAAATT
TAATTTTTAGTATTTTTAAATTATTTTGATGTGCTGATATTAAAAATAAATTTTAAAAAATAAAAAAAAT
ATTATTTTAATATATTTTTAAATAAAAAATATTTTAAAAAAATAACTCATGTCCGGATATAAAACTCTAT
TTCTTATTGGTTATTGTTTGAGAGAAGTTTTCTCTTTTCTTTTGGGACAAGTTAATGAAAAGGGGTTGGT
AATTAGTCTTGAATTAATTATTATTATTACTTCCACATTAGTCTAATTTGGGTGATCTACCTATAACAAC
CACCTTTATAATTTCAAGACATACATGACCCCCTCTCTTAGCATCGCCATACGAGAAAATCATGAAGTGC
ATTGCTCTCTAATCATGCTTCTTCTTTTTTAAACGGTTAAAGATGTTCTTAAACTAATTTGTGTGTTAAT
AGAGATTAAATTTTTTATCCTAATGTTTTAAAAATGTATTAGCACGTTACTAAATAAATTTAGAGATTTG
AATTTTCTTAACATTAAATGCATGCTTGTTTGTGTGATCAACGTGCGGTTTGTCGTATAAACAAATGAAC
CCCAAGTTACCTCTTTAAATTTACTATTAGTAAATTGTTTGGGTATGAAAACAAATAAAAAGTAAAATCA
ATTGGTTTAGAGACGTGAGATACTGTTTTAAATGTGTTAATTTAACCTACGCAAAGATAATATTTCTATG
ATACAACTAAACTCTTTAAAGCTCTTGAATAATAAGAAGAAAAGACAGGTAAAAAATATATTTTTTTTCT
ATCTGTTTTATTTGTGTATAACAAGTTTATATAGATTTGAAATATTATGATAAGATTATATAACTGTTAA
AAAAATGGTTATATTTTAAATTAAGAAAATAAATGTTAAAAATCATTATAAAACTCATCTATCATAGCTT
CTTAAAAAGATAATTATATTTTGAATTAAAAAATTAACTGTTAAAATTTATTAGAAAAACCCATCCATTA
AAGCTTTTATTTAATTTACTACACAAGAAAATATTTATTTTCATTGTAGATGGATTTGAAACCACACCAA
CATTTGCTTCACTTTTATTTAAAAGCATCAATAGGTCTCACCAATGTAACGTTACACTTGCAGCAGTACA
AGTATAGTGGTTCCTCGAGTCGTTTAAATTTCAAAATGGTCAGGTTGGTTCGAAAAGCAAGACACTCAAT
TGGTTCGGATCGAGATCTATTTCTCTGTGACCCACTTCTTTGGTGACGATGATGATGGATCATGAGCATG
CTTTTTAATCGCCTAGTATATGTTCTACATTCCTTGCTGCTGCTGCTGCTGTTTTCTTTTTGGGCAGCGG
CGGCAGCGCAGCAGCAGCAGCAGCAATCTAGCTAGCTAGTTGTTGAATTTGAGGTAGGGGCTAACTCGTG
CAAGGATCGATGATTCCATCACCTTAAATGTTGTCAATCCCTATGGGAAATGAATGCTAGACGATGCCCT
GGTGAAATCTTGGAGAGCCCTGGATTCAAAATAAATCAACTGAAACCCAATCACCTGCCATCATCAACTG
CATGGATGTATATTTGGATTGGAACTACAGAGAAGATCAATTCTCTTGCATTGCTGGCCCAGAGCTGTCA
AGCGTGTAAAATATAATAGGTATTGATCTTGACAAAGTACCAACAAGTTAGGTTAAAATTAGGTGCATAT
CTGAAGCATTCCTTGATGTTTAACGTCATAGGAATGTTCATATCGTGACGGTTAAGGTATCCCTTTCTAT
TTGGAATTTAAGCAAAAAAATTCTCAGTTTCATCAAATTAAGTCGACATCGACTCATAAATTCCCTCAAT
GATATCATTCAAGCAAGAACAACTTGTTATCGTCAATCGACATCACACCAAATAATTACGATAACGAAAA
ATAAATTTGATTAATTAGCTGTACTGGACTTGGAATTAATGCATTCACTGTTTTTATCGGGGAAAAGAAA
AGGACTTCTAGCTATATAATTTCCAGTTGTAAATCATGAATTAGCCTAGCAAGCAGGTTGATTTAATACC
TCATCGACTCCAAGTTAAGATGAGTTTAAGTTAAAAAAATAAAAAATTCCAGTTGATATGTTGAAATCCA
GTTAAAATCTGTTTCTTCTTTTTACAAAATAGTATTATTTTGATTTTTTTTATGAAAAAGGTTAAGTTAA
CTCGGGTTAACCTTCTTGAATCACCTTAGCTCTGAATTGATTTTTAAATTGATTTTTATAATTATAATAA
AATTAATATAAAATAAAAATAGAGAGAAGAAAAGGTTGATATCTAATTAATATCCAATTTGTTTACCTTG
AAAATAGAATTTACAAGATTTTATTCTTCATTTAAGATCTTTATATATATATATATATATATTACAAAAC
CTTAATAATTTATTATCCTTTCAAGTCATGCCAATGATTTAAGACCATACAATGACTCAAACCATGTTAG
CAAGCAACCACATGAAAGGTTTTTCCCATCAACAAACTTGGGAAGGCCAACAATTTCTTAAAAGAAAAAA
AAAAAAAAGAGTATATTTCCCACAACGTTGAATGAAATCATTCACAACCCAACAAAAAAAAAAAATCAAT
TATTAATTCAACAGAGAGAGAGAGAGAGAGAGAGAGAGAGAGAGAGAGATCGAACAAGACAGCAAAATAT
GGAGACCCACAAAGGAACATTGGACAGCTGTTTGGCAACCCTTGTCTTTGCCACCCTGTTCTCACACTTC
TCTTCAAAATCTCTCTTTACCCCTTTATATATGCGCACCCACACCCACACATAAACACCTACCATCCACA
TTCCTACAAGCTGTTGTCTCCATTCTCTCTCTGCAACTTCTCTCTAAACAAATCTCATTTCAAAGAGGAA
TCGTAGTCTTTCTTTCTTTGCTAAACAACAAGAAA
Sequence ID: 143
Sequence Length: 3073
Sequence Type: DNA
Organism: Poplar sp.
TTTAATTGAATTTATTAAAGACTTAATTGCAAGAAAAATTGATTTTTGAAGTCAATTTAGGCTTTAATTG
GAAGAAATTAAAGTCTATGGGTCGAATTGTAATTTTTTGGAGTTAATTTGGTCAGATCAAGGGTTTAATT
GCATAAATAACAAAGTTTGACTAACAATTAAGAACTTGATTTAAGAAATCCAAAACCAAGAACCAAACTG
AAAAAGACATGTGAATGTAAGGGCTGAAATTGACCTAATTATGGGTTGAATTGAAGAAATTAAAAGTTTT
TTGATCAATTGAGGGTCGAAATGCACAAATTCAGAACCAAGGATTAAAATGAAAATAACAGTCAACTTTA
GGGCTAGCAATTGAGTTTGGCAAGGGTGAAATTGTATGAAATTAAAAGTTTGGAGGCATTTATAGGTATA
ATTAAAAGCAATTGAAAGAACAATTGCTTAATTGAAGTTTACCAAATCCTAAATTAAGAACCCTAAATGA
CTGTTGTTCAGACTTAATGAAGAGAAGGTGAACGACACATCATTCATCAGCTTGAATCTCTATTTTGACA
GTTTTGGCGGGTCGAATCGACAACTTCAAACGAATGAATGTGGAGTTACTAACTTTTAAATTGAGCAAAG
TTGGATCTAAATGAAAGGTGTGCACCCCCTCTACCAACTTCAGGTGGTTTCAGAAGATGACGATTGCATA
ATTGCTTCAATAAGACCTTGAAAATGGACAACTCAGTCAACCCTGACAATGCAACCTAATGCAAAAACTG
ATTTGGTTTTCGTGTGTTCATATATAAAGGCTCCTTATGGGTTCTTATCAAGGGTTTACATCATTTCCCT
CAAGATTAAGAGGTCAGAAATGGATTCAAGACCTCCCAAAACCCTAGAAATACCTTCCTCAAATAAAAAA
AGGCTGAAAAAGAGGGGAAGAAAAAAAGAAAAAATATAAGAAAGGGAAGAAAAATATCAATAAAAAACAT
AAGTGTAGAGGTCTAAAAGCCTAAACAAAAGTTTTCTTAAGCTTTGCAAGTTTGTAAGAGGCAACATTTT
CCAAAGAAAAGCCAAGAAAGAGTAGTTGTTCTAGGTATACATTGTTGATCCAAAAGTAGGTCCTTTGTGG
ACTGCTTTTGTTGTTTTATTTATTTATTTGGTTTTATATTCATGTTTACAAGCATAGAAAAGAGGTTTGA
AATGTTTAACAAATGATGTTGCATTCACCTCTTCGTTGCTATGATTTTATTTAAAGAAGCTATTTTGAAG
TGTTTTTTTTAATGTTTTTGATACATGAAAGTTATTATTTAAGTTTGTTTTTCATATACAATATTGTTTT
AGTTTTGTTTAACTTAAGCTATGCATGTTAAAACAATGGTGTTTATCCTCGGTTTACTAGGTCTGTTTAT
GCACCTAATGAGTTCAAAAAATCAATTTTGAATCCATGTTGCATGAACATATATGTTGCTTTAAGTTGAA
AGTTTTTTTGATTTGGTACCTCATGCTTGATTTTGATGCTTTGATGTTTTTTTTTTAGTTAGTTTTTTGG
TTCAAACATGTTTGTGTATGTTATTTTGAATTCTTGAGATAAAAAGAACATGTTTTAAAAACAAAAAATG
CCTGGCTTGGCTAGGAACTTTTCTAGGTTTTTTAGGCAATGTTCTTTGTGTTCTTGAGAAGAAAGTTGTC
TTAGCCTATAGGTTCAGACCAATTTCGGTCAATTTCCTTGCATATAACCCTTTCTTATATGATTAACCAT
TAATCCAGTGTTTATTTGCATCAATAACATGATTTTAACGGTTTTTAATCCTAGAGTTTTGGTTTAGAAC
CGAAACCTATTTTGATAAAATTGTTATGTTTAAGTGATAATCGAAGTAAATAGATGTCAGATTACCGATC
CTTGCATGATTTCCAACATGTATATGCCTTCGTTTTGATCAAATTTGGTTTGTTTTGGATTTCATGTTGC
TGGGTTTGTTCGATTTTCTTGACTGTTCTTGGTGTTATTCATTTTTTTTTGTGTTTGATTCATTTTGCTC
AAGTTCTTTTGATTTTTTTTTAATGTTCTTGGGTGTTTTATTTTTTTTTTGTTTTTGATTTTTTTTTTGG
GTTGTTTTCGGGTCAAACTAGGATTTCTAGCTCGATTTATGGTCAAACCAAAAATCTCGGGTCAACCCAG
TCGAGTCAACTTGATCGAGTCAAGTAAAAAAAAATGGGTCAAAGGTTTTAATACCCTATTTGGTTTGCCA
TAAATTTTGTTAAAGGGTTTTTGGGTTTTAGGGTGTGTTTGGCAAACACCCATTAAGCTATATTTGGTAG
TTTTATTAAAAAAGAAATTGAGTTTTTGTCAAACAAAGCCTAAAAAAATAATAAAAAAATATTTTTTTTC
TTGCATATGGCTAAAAATCCTAAAGTTATTTAAGCTTTTATTTTTTAAAAATCTAAAATATTTTGACATG
TTTTTTTTTAAAATAATATATGGATTTTACAACAAGTTTGTAAAATTTGAAAGGATTTTAGTCTACATTT
TAAAAATACCAAAAATTTTTATTTTAATATATGGGATTATGAACTTATACGAAAGATATATTCCTGATAT
TAAAATTAAAAAAGATTTTTTTTGTTTCTTTTAATATACAAGATTATGAATTTATAAGTAAGACATATTC
CTGATATTAAATAAAAAGATAGTTTATTTTTTTATGCTGGCATTAGAACGGTTTTGTTTTTAATCTGATA
AAATAAAGACATCCTTACTAAGAAGTACTTTTCTTATACCTTAGACACACAAACTCTTATTCTCTTTTTT
TACTGATAAAGAACAATAATTCCTTGTCCTTTTCACCCACATCATTCTCGACGATCCCGATCCGAGAGGA
TGATCGCCGTAACATTGTACAAGTGCAACAAGACTCATCAAATTGATTAGATCACATCAAATCAATTCCC
ACATAATTTGTTTTCAAAACAATTATATTAAAAAAGTATTAGTAGCACCTAGATATTTTCGGTGGTGGTG
GCTATAAATAAGAGTGCAGAGAAGAGGCAATATCCATTTTAAACACAAAGTAATATTTCCAAG
Sequence ID: 144
Sequence Length: 2537
Sequence Type: DNA
Organism: Poplar sp.
GAGTTGAACAAAGGAAGAAAAAAAGAAAAAAAAAAAGAGCAAAAAAGCACAAATTCACAGAGAGAAGGAG
AGAAAAGGGAGGAGCAACACAGAGACAAGAATTAGCCTTGTTATTGTCTTCGTCCCTGCAGAAAAAGAAA
AACCCGAAATCAATTAAAAAAAAACTCAGAGAAAGCCGGCATATCCATTACCTTCTTAGTTCGTTCATCT
CAAGAACTGAGAAAACAAAAGAAGAGAGGACAGTGCGCACAGCTAGGAGATAAAGGAAAGCAGTTGAACG
AAAGTCACCACCAGCATTGCAGCCATCTTCGCCATCTCCAGAAGCAGGTGCGCCATTTCCCTTACATTCT
CTGCATTCAACAACATTTGAACACTGTGCAAAGGTAATTTAATTACCTTCGCACTGTTCATGCACGCGTG
CATCCGGCTTTTGCCCAGCCGGGTCACTGGTTTGGGCCAGTGACCGGGCCGGGCTGGCTGGGTCTAGCCT
AGCCCACATGGGCTGAGCTGGGCCCAGCCCCAAAAAATAAAAAATAAAAAAATAAAAATATTTGCATGCA
TAAAAAAAATTTATTTTGTTGGTTTATTCATTGATGTCAGAGTCAAGAATAAAAATACTAATTTAAATTT
ATTTTATTTAGTCACATAAAAAAATATATGTGCATGTATAAAAATAAATTTATTTTATTGGTTTATTCAC
TAACACCAGAGTCAGGAATAAAAATACTGATTTAAATTTTTTTTTTTTTTAGCCACGTAATATTTATCAA
CGCCAGAGTTGGAAGTATACATAGTTGAATACTCATTGACGCCAGAGTCAGGAATATTACAAGCAAACCA
TCATAGCATAAACCAACAAACTTTTAGCAATTTCAGATAGAACTAGCAATGCAGCCTGCCTCAGATAGGA
CGTTTAAGGGTGATAATATCTTTTTTTTTACGTAACCAGTCCCGTATCATAGAATCTCTGCTGACCACTT
AGGGTTCCTAGTGACCATAATATTAGGTGGCGACTCCTTAAACAAGACCATTCCCCATTAAAAAATAGAA
TGCAAAAAATCCATTATTTCCATTAAAGATATTTTTAAGGTCGTCATGATGTTGGGTTCAACAGAGCTAG
GTTTACTGAGACTCCGTTCTCATTATAAAAAAATAGAAAGAAGTTGGTTCCTAGACAAGGTGCTATCCTA
GGCTTAGAGCTGAGCTAGACCCCTACTTCGTAATGATTTAGAGAGCTCCGAATCAGGCTTTCAGGGCGAT
CAGGGCAAAAGAGAAAGTCCAATCTGACCCTAAGCAGATGCTTTTGACATCTTATTCCCATTCGCTTTCA
GGTTTGACATTAGAGCTCTCGTTAGCTGTTCAAAATTAAGCTGATTGACTTAAGGTGAGGAATTCGAGAC
TTTTAAGAGAAAAAAACACTATTGATTAATATTTAAAAGTGCATTTTTATTAAGGCTTTATATCATCATA
TTGCACTAAAGTATCATTAAATTCCCTAACTAAAGCATGTTTTATAATAAGAAATCTGATAATATAGTAT
ATCTTTAATTTATGGTAAATGTTTATTTTGAATGCAGGTATATCTCACAATTCAAAGGATGGATTGATAT
GATTAACTATTGAAAGTGAAGAGACAAAAAGAGGACTAAGCTAAGAGAAGAGATGCTGGTTTAATTCCAA
ATTGGAACACCATTCGGTTATTGGATCATAACTGGAGTTTTAGACCTTAGATTTAGGTCTGTTTTATATG
GATGGAAAGCTAAGACATAGATCTAAAACTTTTATGGGAGTCCAAGAATCAATTCTGCTGTTTTCAAGTT
CAAATCTTAGCAACAACAGAGAAGTCAGAATCTATCCTGCAGCTCAGACATTGTTCGGTGTTCAGCTCAT
ATCTTGAGTTCTAGAAGTCCAAATGAGCTCTGGTTTTTTTTGTTGGAAATCTGAGACAATTTCCCACAAC
TTTGATAACTACAATGGGCTCTAATTCTGATGTTAGCAATGATGTTTTGGCCAGCCAACAATATCAATAA
CTAGCCGACAATGTCAATAACCAGCCACCAAATCAATGGTTGGCCACCAACTAAATAGTTTGTCAACCAA
TCAATAGTTTCAAATTTTAGCCTATAAAAGGAGGCATTTGCCATGTATTTAGTCATATTATTTTTCAGAT
CAAAATCATCTTCTTGCTTTCTCTCTTTGTAATGTTCAAATTTTCTTTCATGCTATATTAATCTCTTGTT
TATGCTTTTTTCATTTCCTTTCCTATACTTAGTTAACTTATATCATGTTTATGTTCTTATATTGTTTATT
TATGTTTTTCTTCTTCAGTTTATGTTTAGCTAAGTTAATTATGTCAAGGTGAAAAGGTTTCACTAGTGGT
GTTAGAATATGTATAATATAAACTCAACATGGACTTTAATGTTTATATCAAAGAAAGATTGTTATTAACA
TGTTTTATCTTTTTATCTTACTAATTTTTAATACCTTGCTTGTTAAATGGTTAATCTAGATTTGTGTTAT
ATAACACTTGGTACATC
Sequence ID: 145
Sequence Length: 3334
Sequence Type: DNA
Organism: Poplar sp.
CGAGCGAGTTGAATATATCATGTTGAAATAATTTTTTATATAAATATTTACGAGTTGAGTTTATATTACT
AATTTTTATGAATTTATATTTTTAAAGACGGACCTACTCACCTACAACATAGACTATAGGTTCCATGGCA
TTCTTAGGTATAATTTTTTTACATTATACCACCATTAAATTCTAGCTACCTCTCCCATCTCGGCCTCTAG
TAAAGAAATAATTTTTTTTTGTTGCGTTAAAGAAATTTAATAGGAAGTCCATTGACAAGAACTTTCAAGC
CAAAATATTTCTAAATAAAATAAAAATAAATGCTCAATTTATAAATTATCAAGTATAAAGATAAAAGGAG
TATTGGGTATTCAGGTTTGGTTCGGATTGACCGGGTTTCAAAAATTTTGATCCGTCACTCAACCCTTTAT
ATATATCTATTTAATTTTTAGATTTTTTAATTCACCATCATATGTAATATCTATATTATCTGACTTTGAT
GAGTTGAATCGAGTTAGATAATATAAATATTACAGACGAGTTAGTTTTTTTAAACACCGTTGCTGATATG
ACAAGTTGCTTCGTAGAAATGTTTGATAAGGAAATTAAAAATGAAAATATTTTTGGGTTTTCTTCAATAT
TATGTCTAATCATATGTATAAACACCAAGCTGCAATCTTAATTTAGTAAAATAACATTTATAAGGTTAAT
AATTAGTAGAAACGTTGACTGTCAAAATTGTTGGATATTATACATAAAAGAATTTTCACCCTCTCCCTTT
CCTTTTATGAGGCCAGAATCTTTCCAACTTTGCTATGTTTTTTTTAATTTTTAGATTTTAAATCTTTTTT
TGCCAATTAGAGCATATGATTGACAATTATTCTGGTCAAAATTTGTGTTAGTCTACAAACCGTAGTTATA
AAACTGACATAATCTAATATTCAATCTACGGGAGTCTAGGACTGCCTCAATGACCGAATGAGGTGCATCT
GTTGCTTAATTAACATCTCAAAAATGCAAATATTTGAAAAATCTACATACGATCAATAATTAGTTGATGA
CAGTGATTATTATTATTATTATTATTATTATTTATTATTATTATTATTATTATTATTATTATTATTATTA
TTATTATTATTGCTTATGCAAATTATAAATAGATATCCCTCTTTCATTTTGAGTAGAAGAGCTGGCTATT
TAATTTTAGGTAGAGAAAGGATCTCTCTGAGGAAAAAACGAGTAGAAATTGAATCATAATAAATATTGTA
CATACAATGTAAACTATAAAGTCCATGGGAAGCGACAAGGATCTCAATATTAAAGCTTCTGCCACCGATT
TAGAGCTGTCGACAGAGATCGATATCTACAAATTAAGGACAGTTGATCAATCTTCGCTATATTACCCTAC
GCATAAACAAGCATACCAACCTGCATCGATCTCTCCCATGGCTACAAAATATTTTGTCAGGTAATATTAG
GTGTCATCTACCGCTAATGAACAACGTATTATGTACTAATTAAATCTAATATTTCATAATGTCTCAAGGT
ATCAAATAATAGAAAAAACTTGCAAAAGCATCAAGTACCCCACCATTAACTAATCCCTGTTTCTTGTCTC
CCTCTCCTTGTTCTTGTTCAAACATAAATTGTAATGAAGCACCCCATGTGCATGCAAGCTTGTTGCTTAT
ATTTCTTCCTGTTGCTGTTAATTTCCCCCCTTCTTATCTTGCATGAGTGGATATTGCATGTCATTCTTCA
TTTGTATGTTCAAGCATCCCATCGATGTAATTATTCTACAACGACTCAGCAACTCAAAAGACCATAAATT
AATCTATAATTAATGGAATGTAATCCCTTAACTTACAGGAAGAGTTTACTGGTTTTTCGAAGTTGATCTC
CTCAACTATAATTAGGTCAGTCGAGTTAATAAACTTGCAGTTTAACTTACATCTATCTATTTATAAAGTA
TTTAACCCCAAAAGATCGATTGGTCTATCAGCATTTAGCTAAGGGCTTGGGAGGGTTCTCAAGTTCAAAT
CCTATCAGTATTAAATTTGTTAAGATCATGACTATAAAATTTAACTCTATATAAAAAAGCTAGTTATAAG
ATGTAAAGATTTAATGTGATGAATGCAAGCTGACTCAGAATACTTTATATTTTAAAATAAATAAAAAAGA
GTATTTTAGCTTTTATCCACAACTTTTTAAATGAAAAACTTGGAAATTGTTTTAATATATACACATCTCA
AAAGAATATTAATTATAAAAACAGATATAGATCATTTATCCAACATGAAATATTTAATAAATGGTAATTA
ATTAAATCACCAAATTAAACTTGATTCAATAAAATATGAAATCACCAAAGAGACATGGCACAAACGCAAT
AAGTCAGTCAAAAAATCAAAGATTCATGAAAATGGAAAATGGCGATGAATATTGTCCACGTTGTGAGAGT
TGTTGAGTATCATCGCTATAGACTAGACAGAGGTGTCGAATCAAGAGGTTGAGATTTTTTATTTTTGAAA
AAAGAAGACAAAAGGGTTAGTCATTGACGGCGTGATTGAAGTACCAGCGAAGCCACGTGAGAAGTTTTGA
GAAGCCAAAGAAACATATTTTGTTACAGATCACAATCAACGTTCGAGTGGGGACCCACTTATAATATTTG
CCACCTTTCATTGAGATTGATTGCCAACTGGCAATTCCCCCACACCTCTCTTCCCTATTTTGTCCTTCCC
ATGCCATGCTTATTTACAAGACCCACCCTTGCTTTCAATCATTCTCGGCCAAACCAACCCTAAATTTGTG
GACACTTATAGCCCCGCGGGGATGACCTTGTGATGCGGGGGGGGGGCAAAGGGCTAGAGAGGGTCATTTG
CATGGTGAGGTTGGCTTGCGTGCATTAATAACAAGTTGGTATGTTTCGGTAATTAAGTTGGAAAACAAGG
GGTAGGTTTGTTGCAAGCATGTCTATATGATGCCATTGGCCTTAAGCATGATGCGAGACAATTGGCTGTA
ACAGTTGCGTTGAGGTGGACACGAGGATAGATAGATAGCAGAGAGACAGAGAGTTTGAAAGTAAGTGAGA
AAGATGCGCACAGATTCTTTTGGCTGATTCATCAACTTTGCTCCTTTCTTCTCTACTTGTATGAATTTAT
GTTTGACTCGTAAATATATAATTCATGATATTTCTTTCATGTAAATCGATGAATATGTTTTTTTTTTTAA
TATTTTTCTTTCTTAATATATTGGATAGAGTTTTTGATCTTCAACCTCTTGATTATTCATACTTGTTTCT
TTTCCGGATATACAGATTTGTTGAGTACTTGAGACAAGAGAGAT
Sequence ID: 146
Sequence Length: 3258
Sequence Type: DNA
Organism: Poplar sp.
CCCGGAGAAGCAATTGCAAGACAATCCATCGGTTTTTGTCTCGTCTTTTTCTCTTTTCCTTGTCACTTCA
AAAGTATATATATATATATATATATACTGGAGAAGCTAGTGATCTGTATCCATATCTATTATCATAAATA
TCCTTTTCAACATGGATTGTTCTTTATATTTAAATGTTTTTTTTATATATATATTTTCTCATGTAAGAAT
TTAACACACCCACGTAAAACTAAGGAAAAATCATGTAAAAAAATAATCAATATGTGTGTTAAACTTTGAA
AGACTAAAATAATTAAGATTTTATTAGACTTTTTATAAAAACCAAGGTCTAATGTGCTCTAGTCAGGTGT
TAGCCAATGGCCCGTCCTTCTTTATATTTAGTTGAATTTTATATATATATATATATATATATAATAGTAA
AACTATTGCATTTCTCAAGAAAAGTTATGGTTATGATAAGTCAAAATGTATATAGCCATGTTTGTAGTGG
ACTTAGAATTAACTAATTATATTATAGCTAATGAGCAGGATGGAGCCAAAAAATAAAATTAAAGAAGGTC
AAGATTTCAATTGTTTTACTATTTGAACTAAAAATATAAATATTGTTAAGGAAAGGAATGCAAAAACAAT
TTCCTTGCAGGGATTGGGCCTCCTGCTAGCCCCCATGTCTCTGCCACTACTAATGAACTTGTAGTTTAAT
TCACAGTAAATTTTTATTTCATTAAAAAAATCATATCATACCCCGTGTAAAAAAAGAGTGAGAAGAGTCT
CTGTATAAAAACAAATATTTAACAAGTTTTTGAGGATGTTTGTGCCGATTTTTATATTTAGGAAAAGAAA
ATATATGAAACTTAAAGAAAAAGAAAAAAGTATTCAAAAATGTATATTTAACAAGTGAAGCTTAGAATAA
TCTTTATTTCTTACTTGAAGTTTTTTTAGGTTATGTTGGGGCAATTTTTATTTTATAAAAATATAATTGA
TAAATATATCTTATTTATTTTTGAAGTTATTTTTGTTTAGTGAGCACTTTAAATTATTGTTTAAATGACC
CTTAACTTAAACCGATTTTAAATAAAATAACCTAAATCTATTAAATAAGGGAATCTTTGATTTAATTTCA
TTATTTTTTCTCTCCTTGCTAGTCACATGCCTAAAGAGAGTGGCTTTCTATCCACTTGTGCAGAGGCGTA
AGGTCCCAAACAGCATCAATCATGATACCCCACCTACCCAACGAGAGGCTTGAAAATGACTCTTTTTTTC
TCAAGAAAGAAAATCTTTTTTTCGTGATGTGATGTTTATTGTTATTTTTTTTATTTAGATATTTTTATAT
TTTTTTTTAAAATAAAACTAATTTCATTTAAAATTCGTAACTGTTCTTTCTGATAAATATATATTTATTA
AGGTTTCGATTTCCTATTTATCATTCAAATAAAGAAAACGTAGTATTTAATTTTCATTAAATAGTTTATT
TATAATGATGACTTTTTATTTCTTTTTTATTGAGTAATAATAGACGTTTAGAAAGGCTAATTATATTTAC
AGTAGAAACATTGAGTATACACAAACTTTTATGGAGACTTCAAAAAGGCAATGAAAGAGGAAGTGTTTTT
CACAGTGGTTTGAAACCCGGCCCGACCCGGGGCTGGAATCGGGTCGGGTTGATAAAAAAATTGCATAAGC
CATGACCCGGTGTGACCCAGCTGACCCTGCGGGTTGACCCGGTGACCCGGTTGACCCAGCAAAACCCGGT
TGCAACCCGTTGATTTTTTTTTTTTTACTAAAACGACGTCATTTTGAATTTTTTTAAAAATAGAAATTGA
CCCGGCCGACCCGGTCAAAACCTGGAACCCGGACCTTGGACCGGGCCGGGTTTAAAAACTTTGGTTTTTC
ACTCTGTGTTTTATATAACGCTATTTTAAACTATTTTAAAGTTAACATATCATTCATCATAAGTACCTTT
TATCTTTTTTTTCTTTCGTTAAAACATCTCACTCTTATTTTTATTTGTAGAATTATTTATATTTTAAAAA
ACCATCCGAGTAATGAATTTCATTTTACATGTTACATGTTAAGCTTTTGTAATTTTTTTTTTTAATGGAA
ACCGAAAATAAAATAAAAAATTCCAACCCATTTTTTAATGGCACAATGAAACATGGTAAAGGGTGAGCAA
AAAAACTGGAAAATCAATTAAACCGAGAAAACCGGAAAAAAATAACCGAAAAAACCGAACCGTGAAAAAA
AACCGATTAAACCGATTAAAATTTTGAAAAAACCAGCTGGTTCGGTTTCGGTTTTATAAGTCTGAAATTG
AAAAAACCGAACCAAATCCAAACCAAAAAAACCGAGCCAAACCGAAAAAAACGAGCCAAACCGAAAAACC
GACCAAAACCGGTTTTTGTCCTAAAAAACCGAGCCGAACCGAAACCGGTCGGTTTGAACCGGTTTCGGTT
TTTTTTTTAAATTTCGGTTTGGTTATTGTTTTTGATAAAAACCGAACCGAACTGAAAATAATCACCCCTA
ATAGTAAATAAAGTTGTTTTTGTATTCATTATTTTTTTTAATTCAATAAAGCATGAACTCAAAGTCACTA
TACTCTAAGCTAGCATTACTCGGTGGTGCATTATTTAGACCTTTTTTTTTTAATTATTTTGGTCATATAT
TTTAGGTCATGTTTTAGTAAATTTAACTTAATTTATTTTGAATTATTATCACTTGAATATCTTATTTTCA
TGTTTGCACGCGGTGTAACAAAGGCCATATCTATATAGTTTGGAAACCAGAAAGAAAAGAAAAACAAGCA
AATTACAACGATAAGTGAGAAATCAGTTAACAAAAGAAAAAAAAGATGGAAGAAATTGTCAAATGGACCG
TTAAAGCGCCTAGAACCAATGCTAGGCTAAAGAAGATTTTTAAGCGTGGGGCTAACATCTTCCCTGAAAA
ATGACAGAAGATTCATGATAATTTTACATATATAGAAAAAGAGAAATGAGGTTGACATGAGAGGAGGAAA
GATGGCCAACCCCTACCTCCATTATCAAGATTCCTTCGGACGTTTCCTCGAGAAGAGTGTGCTTCTCTCA
TGCCTTAAGAGGGTCCCACAATTGCCCTTCCTCTTCATCGCAGCCATTACTGATGCGCTCTCTCCTTCTA
TAAATAGAGCAGGGCTTGAAGATATAACAACTCATTAAGCTACACAGAGAACACATTCATACTCCAAGTC
TTTTAGTTCATCCATTTAAGCTTAATCAATCAATCATC
Sequence ID: 147
Sequence Length: 3079
Sequence Type: DNA
Organism: Poplar sp.
GGAGACAACTACCTAGAATATGACTAGGATGAACATGAAACTAATGGCCTGTGTCGAGAGACTGTGTCTG
GCTATAACAGCAATAACAATGCCTTGGAAGCACTCTTGGACTATACTATCAAATTACATAATCTATTTTA
AGATTTGGTAGTACTGAAAGGTTTAATCTCGATATATAATTAATACCTAACCAAGTGGATCTCACCACAA
AATTGTTGAATTTTTAGTTTTTTTTTTGTATATTTTAATGTGAATTAACATACATCTTATATGCAGGAAT
ATATTAAAATTCTAATGTTTACAATTTACATACATCAAACTCCCAACAAATTATGTCATGTTTAGCTTAA
AAAAAAAAAAAACTCTTCATCTCCATTTTTAATTTATATGTATTAGGATATATTCAATAAAAAAAATATT
TTTATATGGATCTCCATTTCCAATTCTCTTCTCTATCTTCAAGGAACAATTAGGAAAAAAAAAAAATTCC
ACACGGCCTCAATTTCATGATGTAAATCTATGAACCAAGAAAGCACCACATATGGATCCAGGATGGATCA
TTAACCCAAAATAATTTTGTTTTAGTAATTTTTTTTGAAGAAACAATCTCATCTTATAAAAATTAAGTAA
AAAATATTGAAGTAAACGTGGTCAATTCTCGCCTGGATTGGCTGAATCAACTGGATCTTCTGAACTAGAT
AAGATTTAATGACTATAATAATTCCAACCACAAAAAACATGTGCTTAGGCCCTACAGCCTAGCTAGTCAT
CAACTGCTTAGGCTTCTTGTTATTATTTTTCTCTCTTGAGATAAGTGAATAGACTTTTCAATTTATCGTG
TTTTCCAAGTCAATTTGGTGTAGCAGATTCCCTTTTGGAAATCAAATCAATGTGTTGATTATCATCTTCA
TCTTTTTTTAATTTATTTCTTGTTGCTTGTTCCTTTTAGCTACGCAACTATCACATGATGAAATGCATCG
CTTCTCATGGATTGTGTCGGAACCATCCACCCTTCTTTATTAACATGCAAGTATATATAATTCCTACATG
CACCCAAAAAGAAAAAAAGAAAAAAAAAGGGGAAATTTTATCATCTTGAATGTTGTTTTGTTCTCCTTTC
TTTATTTTTTTTTATTGATGTTAACTCGATCAGTCTAAATTTGATTTAGCTAGTTAGTTGAGTTGTAAAT
CTGTATAATCAAGTTAATCAGGTTTTTCATAAATCAATATTCTTTTTAATTTATTTAAAATCAGGTAGGT
TTTTTTTATTTCTCTATTAAATAATTCTTAATTTTTTTTTTTTAGTTTAACGTGGGTGTCCGGGCCAGCT
TGCGCGCACCTCAACTAATCCCACGGGCCCTGAAGTTAACGACCATGTAAGCCTCCAGTGACCATCATAT
GAGCAACCACAAGGCTCGAACCTGAGAACACAAAAATTTTTAATTTTAAATACATGGAAATAGTGCTTCG
AAACAAAGATGCATACTATTTACTATTCATGATTTTTTTTCGTGGATTTAAGAAAATAATCAGTGGATTT
AGTGTTTCCCTAATAAGGACTTTTCAAATATAAAGGACTAAAATGTAAGATCTCTCAAAGTTAGGGATGC
CTCGGCCTCCTCGTCCTTCAACACCATTTTCCGCCCCTGGGGTTGAGAGTTATTTGAAAACAGTTGGAAT
CAAATTGATAAAATGCATATGGTTTAGGATCTAATCAAGAATGAGTAAATAAATTAGGGACTAAAATGAG
AAATCCCCGAGAAAAAAGGCTGTAAAATAGAATCGCTAAAAAACAAAGACCAAAGTCAAGTTTCCACTAG
CCAAATAGGATCACGTTTAATGGCTCACGTTTCAGCACGTGACTGGGACAAGTATGAAAGCAAACAAAAC
ATTATTTTTATTTATTATTATTCTATATTCATTAAAAAAAAAAAAAAGACAGTGAGGATACCGACAACTC
TGGATCCAATGCTTGATTAATTTGATTTATTAATTATTTGAATTTATTAATTATTTGAATAAAGCTTTTC
TTAGGGAATTAATTTGAAAGTTGATTGGTTAGGTTGTATTTCGCATAAAATTAAAATTTAGAAGAGAGTT
TTTACAAAAAAAACAATAGTTTCCAAGATAATTGTTAAAATTGAAAAATTAATTTTTAAGGTTAATTAAT
GTGTTAAAAATGTAAATTAATGTCTCTCAAAGGTAAAATTTCACCTAATTATTTTTAAAATAATTTTGGT
TAATTATCATCCTCTTTTAATAAATTACCCTCTGCTAAATTCTCCCACTTAACATACACTTACCTTTACC
AAACATCTTCATAAAATAATTAATTTTTATTTTTATTTCTGAGAAAAAATGAATATATATAGTTAATGAT
ATAATTCTCGTGTTTTCACATTAATGTAAATAACTAAAATTAAAATTTAATATATTTTTATTAATAAACT
ATTATCATAACTTAAGTTTCAAATAGATTAATGGAATATAAATAAAATCTTGCACTATAATGATGAAGGG
AAAATGACATAAATAATTATGATGTAGATGAATATGTTATCATCACTTCATTAAGTACAAATTTACTAAC
AAAACAAAACTAATTATTTTGTACCGTAGAGATAAGTATTGGCCACTAAATATTATTAAATATTTAAGAG
TTTGATAGCGGTTATATTTTATAGTGTTTTTGTTTAAAAAAATATTAAAAAAATATTTTTTTATTTTTAA
AATTTATAAAAATATAAGATGATATTTAAAAATATGGTTTCAGTTATTTTTTAAAATGTTTTTTATTTAG
AAAAATATTAAATTAATACTTTTTTATTTTTAAAATTTATTTTAATATTAATATATTAAAACGATTCAAA
TCATTAAAAAAAAATTAAAATTTAATAATAAAAAGAAAGTTAAAAATCACTACCGAATATTGCCTAATCA
GTACAAATCTCAAACCCCGAGGTGGACTAAAAAATATATAAATAAAGGGTCCCTCCTTCCCATTCCCTCA
CTGTCAACAACACATTTCCTTCAGGCTTCATAATTCTGCAAAGAGAGAAAAGACAGATATACTCTATCA
Sequence ID: 148
Sequence Length: 2746
Sequence Type: DNA
Organism: Poplar sp.
TTGTGGTTTGAAAAAAATTGTTTTATAAAAAGTATTTTTAGTTGAGGAAGTTGTTTTATAAAAAGTACTTTTAG
TTGAGGTTGATTTGAAAAAATAAATGTTTGGTTAAAACTGTGGTTGAAATTGAGGTTGAAGAAAAAGTAATTTA
ATGTGTTTTGTTAAAAATGCTTTTAAAATTGAGGTTATAAAATAATTTTAAAAAATATATATTAATATTGATGA
TTTTTAATTTAAATATTGTGAATTTAACTATTGTTATTACATCATGAAATAAATCATACTTAATATAAAATATT
TTTTTATTATTCCATGAAAGCATCTACAATTCCATTACGTACGAAATACATCCGATAAAAATTACAGTTTCCAT
AATTATTTTAGTGTATAATAAAATTAGATAAAATATTATCAAGCATTTTTTAAAAAAATATTAAAAAAATTAAC
ACACTTAAAAAAAATTAAATTCGCGGAGTGCAAATGAATAATGCGAGAAAATTGCACTGTTCACTATTTTAAAG
TAAACAGTGCAATAATGTACCAATATATACTGTTTATATTAATTATACTGTTTATTAAACAGTATAATTAACAT
TAACAGTGCAAGAAAAGCAAAAAAAAAATTGCTTGCACAGAAGATAAGGTGAAACATTAAATTTTCATGGGTCC
CATAACCAAAACACAGTTATTAAAAATAATCAAACATCAAATTATTGCGTTTGATAAAAAAAGCAGAAGGTAAC
GAGAGCCAAACACTATCTTAATCTTAATCTTATGTAGTCTGGCCATCCTCTTCTTATCCAAACACGTGTAGCCA
GTCCATTGGAAGCTTGAAAAATGGATAGATGAGAAAATCACGAGGACTTTTTTGGACAAGCACTACTTTTCTCT
CCTCTTTTTTGGTGCATATGTCAGTGGTTGTTGTAGTCATAGACCTTTATGTTGTCGCCTCACCGGAAAGTACA
CAATCTAGACATCGGCAAACACATCCTCTAGGAATAGCCATTTTGCTCTGGGCACTGTGCCCTTTAAGGAGTTC
CTTGCTTTAGGCCCCATTTAGAATTGTAGCTCAAATAAAGCTTAGCAAAAATTTATTTATTTTTATATTTTTAA
ATATATGATAATAGCATAATTATCTTAATACATTTTTAATAAACATTGCTTCTCATCTCTTACCAGCAAGATGG
CACCAAAATCAAGAAGGTAGTACATAGTAAGAGTAATAATAAAGACTGGTCGGTGGGAGACTTGCTCAGGATCC
AGGGCACTTCCGGTATATATTATTAGAATGGCCGGTGGGAGATTGATCAGATACAGTGAATGCATCATAAGAGT
TACAGTGCTAGCTATCTGATCTCTTGAAATCCCATGAACGAGGACCCGAGAGACCTTTTCCTTATCTTGAACGT
GGCAGCCAGAGGGAGTTTCCATGGCGGTGAGCCTGACAGCAGGATAACATTTCTAAGGTGTCGGCAAGCTACTA
TTCACCGCCGACGTGTCAGTGTGTGCACGAAATGGATAAAGAAACTGGTATTTTCAACGGCGGTAAATTAAAGC
ATTCATTAATTCATGCCCATTGCCCAGAAGATAGAAGGAGAGAGGAATAAGGGTACGATAGAGATGGGGCCCTT
TTTCCTGGTCCCACAACATTGTAGATATTTCTTCATCATCCATATCTGATCATTTTTGTCAGCACTGCTCCTCA
ATTCAACATCATCGTTCCACGGTTGTTTTTTTTTCAAGTGACTTTTGTTTCGAAATATCTGGAATTAATATTTT
TTTAATCTTATTATATTAAAATAATATGAAAAAAAATTAATTTTAAAAAATAATTAAAATCCATGGCACGCGTT
TAGTTACAGGCAGAGGGGCAATCCTATTGTAAGAAAAAAAATATCTTTATACTATTTTGGATATTGTACATGCT
TTCTTGTTAAAATATGTTTGGTATAATAGTTTTTATTTTTGTCTGACAACATAGAAAAAACTGTATGATTATTT
AAATAATTTATGTTTTTTTTACCTGACTTATATATAATTACATTTTAAATTTTAATTTTATAAAAATTAAAATA
ATATATTTTTTTATTTATAAAGATTTTTTTTATCCATGAAAACTGATTTTTATTTATTTTACATGCAAAAATTC
ATCTCATTATAATTTAATAAAATATTTTATTTTTAAATTTATATTTTTTAAACCGTAACTAAATTTTTTTAATT
ATATTTTTAAAAGCTAAATACTATTGTAATCTCAAACACACAGTTAACCCATCCACTACTTTTCTATTATAGAT
TCTAATTCTCTCTCTCTCTCTCTCTCTTGAACAAGATATCAACATTACTTAAATCCCATCAAGTGCCTCCTGCG
ACATTTCTTCTTTAAATTATTTGGCATAATAACATGGATATATGTTTATTTAAAATGAATTTGCTTCCTTCCCT
TGTATGGTGCCCTAAACAGGGACCCAACAACTTTCAACATCACCTTTAGCCTTTCGGATTAGATCAAAGGCCTT
TCTAAAGGAAATGATACGTTGGAGTTTATTACATTTATCATCAACACTGTCTGTACACGTAGATGGACATTTTT
GTGATTTCCAGTTATACCATTAGTTTTATATTCTTTTTCTGTCTGCTTCCATTTCCTGTGCTCCACTTCTGAGC
CTATAAATGTGGCACTTGTTTCATTCATCACTTCATATCAGAAGCCATTTCAAAGAGAGAAAAAAGAAGAAAGA
AATACACA
Sequence ID: 149
Sequence Length: 534
Sequence Type: DNA
Organism: Poplar sp.
AAACCTTATCCTTGGTCTCTTGTCAGCGTAAGCATTCAACATAGATGGATGATTATTATTATTTTGTTTT
TAAAGATAGATGATGGATTTTTCTAAAAAAATATCATGGTTCGGTAAAGATTTTGGGATAATAATACATA
TTAAGAAAATATTTATAAAATAACGTAGTTTTATATTTTAGTATATTTTTTTGTTCATAATTTTTATTTA
GAATAATAATTGCATTTTAAAAAAAATTCTAATATATATTATTTAAAATTAATTAACCTAATCAAAAATC
AATTAAAACTTCTATAAGATTTAAAAGTTAGAAAATAAGATTCAAAGTACAAAACTTTTAATTAAAGCTT
GTGTTTAATTACTATTCTTAATAACAATCGTATTCAACTATATTATTTTATTAATACTTTTTTAATATTA
CGAAACTCTAAAATATCTAACACGACATCTATAAAAAAGAAATGAGGGGAAGGGGGTCACAAAGCAAACA
TAGAGAGAGAGAGAGAGAGAGAGAGAGAGAGAGAGCTAAGGACA
Sequence ID: 150
Sequence Length: 3250
Sequence Type: DNA
Organism: Poplar sp.
TCTACATTATACTATACTTTAAAATAAAAACACTTGGCTAATTAAACTAGTCTAATAATTATATGTTTGT
GTCCTTTAAAGATATTGAAAATTTACATTATTATTAATTTTAGAACATATCATATTAATTAAAATACATG
TAAATTTATCTAAATATTCACATTAATAATAATAATAATAATAATAAAAATCATTATACATGTAACTTGG
AGAAAAATTCATTATATTATAAATATAAAGTGTTTTTACTTTAAATAATTTAGCATCATTAGAGCATTAT
TTTTGTTGTTTTTTAATTAAAAAAAACTGTAGGGGCATTGTTGGGTCTGGTTTGACAGCTAGGCCCAACA
CTATTAGGTCTGGCTGAGCCGTCAAATATTTTCAATTTTATTTTTTTATCTCTTTAGATTTTTTCTTTGC
TCTTATTTAATTTTTTTTCATTCGATAAAGAAAAAATAAATTAATAATATTTTTTTTATATTATATAAAA
GTTGAATAATGATAATTTTTTTTATTTAAGATTGAGTTGGGTTGCAATTCTTTTTTTTTAGCGGTTATGC
TGCCACCAGGATTTAATAGTGTTGGGTCCAACTTCCAGTAGGATTTTATAGCATTGAGTTCGGTTGTCTA
GACTCAACAACTTTTAAACTTCTTGATTGTTAGGTCCAATGCTATCGGGTCGTATGATTTGACCACTAAA
TCTAATAATATTGGATCTGACATTACCATCAGACATAAAATACATAATATATTTTATATACACTTCATAT
TTTTTTATATTTTAAAAAAATTATTAATGATCCGTTGATAAGTATGGGAAAATATTCTAGTGTGTATGTA
TATTTATATAACCTGAAAGTTTAAAGGTGTTAAACTGTTTTTATTACTAGTTGGTGGTTTTGATTGGAGA
TCGAGCTGCAGAGATCAGCAATGTAGACTAAGTCCTCGTTTATTGTATGGAAAGTAATTTTTAGAAATTA
TTTTTAAATTGTTTTTGTTTAATAAATAAAAAATATTTTTAAATAGAATATACTTTTCAAAAATTATAAA
AAATTGAAAAATATCTTCAAAGTGCAAATACTGTCTAGATAACCAGTTCCGTCTCAGGTAGACCCCTCAA
GCCACCAAGTGAACAAGAGAAATTGTGAGGGAAACAAGAAATAAAGTTAAACAAGAACTGACATGATTAA
AGTTCAGATTAAAAGATTTTTTATTTGTCGTTTACTTGATCTAATGTGGAAAGTGGAAATGGAGATAGTA
GATAGACTCCCCCGCATTAATGTATCTATCCTCATATAAAGTATGAATAATTAAAATATTTAAAAATATA
TTAAAATAATATTTTTTAAAAATTATTTTTGATATTAAAAAATTAAAACAATTTAAAAATAAAAAAAAAC
ATTAATTTTAAATAAAAAAAACTCAAACACTATTTAAAAAACGTTTTACACGCATCTAAACTTTTTTTAT
CACTTAATTTTTATTTATTTATTTTATTTAAAAAATTTATGAAATTAGATTTTATTTTTATTAATTTTAT
TATCTTTCGATCTTTTTATTTGTTAAATTTGATTTTTATTTTTTATTATTATTTTTTATTTTATTTAAAA
TAATTTATGAAATTGATATTTGTTTTTCAATTTTATCCTCCAACTTTTTTATATATTAGATTTTGTCCTT
ATTTTTTTAATAAAATTCAAAACAAATTAATAAATTATTTTTAGCTCATTTTTTCATGACATAATCAAAT
ATTAAAAAATATTTTTTAATTTTTTTAAATATTAAAAAATAATTAATTTTTTATAAAAACTACTTACGAA
AAGTAAATTATTCTCCAGCAAACAAGTTCGACAAGCAAACGGTATCCGAGAAAACCTCTGTAGTTTTGTC
TTGGCTTCTCTTAACATTCTTTCTACCCCTTCTACAACGATATTTTCATAATTAAACTAAGAAATAAGTG
AAGACTTCACTCCCTTTTCATGACATGTATGGGGTTTTTTTTTTTTTTTTGCATGAGTGTGTTCTAGTTT
AAGATATATTTTTTGCACCCCTGGCCAATACGCCCACTCCCCGATCAGTTGATATCATATGCATTATTGA
ATTATATTGCAATATCTTTAAACTACGCTAGAAATTAAATAATTGACTTTTTGATTAATATCAATATCAA
GAGGCCATGAGTGGATGTGAGTAAAATCAGGAGAAAGCGATGCAGACAAATTGCGAATCCCTCAAAGTTC
AAAAAAATCCATGTTGGTTTCAAAAAAGTCCGAATTATTTTTATAAATCATCATCCTTATAATAGAAGAA
CTTACATTTTAGTAATATATGCCGTAATTGTTTTCTATACATCACATTCCTTATACTAGAAAAACTAACA
ATTTAGCACATAATACATAACATATTAAATTTTTTTAATATGTTTGAATACTTTTTTATTTCAACGTATT
CATTCCCTCATCCCCAAAGTAAATTATTTTAGTTTCAAGAATAATATAAAAGTATTCTTATAAATCTGGT
TCATCTGCGTTCTTAACATGATAGCCGGTTAGAAATTCAAATTTATTCTCTGTAAGTGAATGAGTAAATT
AATTATAAGGTAAAAGTGCCTCAGTGAATGACTCCATATCCCTTTTTTTTTCATGCTTTCAAGAAGAGAC
ATCTGGTTCTGGTATTGCCACGACGAAGTATTACTGCTGAATGGCAGAAGAAAACAAACTCGAGTCTTGA
TGTAGATAACGCTATCGGTGAGAAATCTTGCTGTGGATAAAGTTGTCGGTGAGAAATCTCGAAGTAGATA
AAGTTGTCGGTAGGGTTTTCTGTGTGCGATTGAAAATATTTTTTAATCACTTCGAAGTGATTGTTCGGCA
ACAAATGTGCATTGTAATCGTTTTTGCTATTACAGTTTATTTTTTAAAAAATATTTTAGTTTTATTTTTA
GTTAAAAAAGATAGATTTTCACATATAGAATAAATTATAGACAATTTTATACGTGGTTCAATATAAAAAT
AAAAAACTATTTAGTTTACCAGATGTTTTTTTTATTAGATATAAAGTAGAAATTATGGCAATGGCAAACG
GTATGTAAAAATCCCTGGATTTTTACCATTGATCACGTGACATGCATCTTGTTGAGTAGTATAAATACTC
TTGAGGGAACCCAATCAATTTCAAGTTGAAGAAGTGCTAGATACTAGTAGTAGTTGCAGACAAAGAGCTA
GTGTTAGACAGGTTCTTGTTAGACAGAGAG
Sequence ID: 151
Sequence Length: 3088
Sequence Type: DNA
Organism: Poplar sp.
ATGGTCAAATTTGAATGAATATAAAGGATACATGGACCATGTTCAAATCAAACAAACATATGGTGGGTAT
TTAAGAAGAAAACAAAATAACAATAACAATAACAATAACTAGTCAGACTTATATAATGAACAATAACAAT
AATACTCATTATTTCACACCAACACACACACACACACACACACACATAATGTATAATAGAAATAATTTCA
CTCACCCGAAAAATAGAGAAAAAAGATAAACGAATGCAAAACCATAGATTATTGAGGCTCGCTAGGAGAA
ACATCAGCAAAACTTATAACGGATATGGAAAACACTAAAAAACAACTCAAAGCAACATAACACAAAAGAT
TAAAACCGTAAACTTAGAGACCAAATTGTAATAATAAAGTCGAACTGAATTCACTTGATCGATTCCGAAC
ATAACTCAAACTGATCGAACCTAGCAGACCTGATTAACTGTCATTACAGGGTTAATCAGCTATAACATGT
GAATCGGTCGACTGGTTGGTCAAGATTTCCAGAATCCTGACCTGCTAACCAAAAATCTGCAGAACCTAAA
AGTAATAGACATTCTATTCTTCAATAAACTCATATTCCAGACATCAACCCAATTCATTTAACTAACACCC
TAATACATAGATTAAATCCCTTAAATCATCCATATATCAAATCAATATATATTAAACATCTTAAAACCCT
AAAACACTTCCTTAATTCATGAACAATCAAATCCCCAATCAAAAACTAAAAAGAAGGTAGTCATAATACT
TACTTACTTCCCCAACCCTTCTTAAAATCCAAAAGCTTAAGTTTAAAGTGAGTTGAATCCCTTGGTATTT
TGAGAGAGAAGTCACGGTAAGAGAAGGAAAAAAAAAAACCTCTGGTCACATACCTTTATATATATATATA
TATATATATATATATATATATATATATAGGTTTGGTTTGGTTTTTGGGCTGACTTGGGCTTAGGCTTGTG
TTTGGTCTAAGAATTTGGGTCTTACATTACAAATGTTAACCTTAAGATTTAAAGAGATAAGAATGTTGGA
AGATGAATCTGTTAATGAGTTTTATGTAAAAATTAAAGATATTATAAATTTCAAATTCAATCTAAGAGAA
AAAATAGAGCAGTTGTAAATTGTAAGGAAGATTCTAAGATCCCTACCTGAAAGATTTCGACCAAAGAAAA
GCCATAAAAGAAAGGAAGGATTTGAACACTATATGTGTAGAAGAATTCGTAGATTCCTTATAAACTTATG
AATCTACATTGCCTCATAAAAAAAAGATAAGTCCATTGCATTTAAATCTATTAAGAAATAATATGATTAT
TCCTTTGATGATGATTTTAATAGTGAAGATATTGCTCTCACAGCTACGAAATTCAGAAAATTAAGTTTAA
GAAAAAGAACAATGGTAATGATTAAAAAACAATTTCCAAAAGAAATGAGTTAGAAAATGGAAGCAAATGT
AAAATTAAATCTAAGAAAAGAGTTAAGTGTTTTGAACAATTGAACAATTTTATAATTGAACAATTGCAAG
TATTATCAAACAAGTATAATAATTTTACTATTAAGTGGGAAAAAATATTGATGTTGTTGACAAGTTGCTA
ATGAATATGCAACAAGATATTATACAGGTTAATTATATACTTGTTTAACTCGACTTGGATGTCGAACAAG
TGCATTAGTTTGTTGTTGGTGAAGATGAGAACTAGGATTAGTGTCAAACCAAGAGGGGACAACGATGCAT
GCAAGGGATGCAAATGACAAGCAAAAGGAGAAAACAAGTAGCCAACCAGCCAACTGTCATAATTGTTTTT
GCTTTACTAGAATTTTGCTGATTTTTAATTATAAGTAATGAATATTAAATATTCTGGTCTGTAATAATTA
TGATATTGTTTTTTGTAGAATAAGAACCTCTATGTTGAATATTTGATGCACTTTGAACTTGATATATATA
ATTGTATAACAATATCTTATATATGATAGTTTTTTAATATATTATGAATTGTTATGATACAATATGTTGC
ATATAGTATTTTTTAAATATGTTATTAACTGTTTACATGAAATATATTAAGATCGATTAATTAGGATGAT
GTTGCATAAATATTATTATATTAATTTTTCTCATGCTACTTGTTTCAAAATTCTCAAAGTAAATGACTTA
TTAATATCCTTCTCCTTACTTTTCTTCCACTTACTTTCTCTTAGTACATTCACGCTATTACTAATTATTT
ATATATATCCGTATTAATATACACCTAAAATAATTACTTGAGAGCAAATCTTTTGCTTAACCAACACAAC
TTCCAATCATTTTTCCAATGAATACACTTTTTTAAAATGATTTTTTCAATTGAGAATGGATCTTTCACAT
TATTAACTTCAAGGTTGGAGCATGTGTATTTATAATGTATTTTTTAATTAAAAATATATTTAAATGATTA
TTTTTTAGATTTTTTTTAATTTTTTATTGAAAAATATTAATTTAATATTTTTTAAATAAAAATTAATTTA
AAAAATATTTCAAACTACAAAATCAACACGCTTTGACTATATGATGATTAACTCTTGAGCAAGCATTTCA
CACATTCGGGATGGAGTAACAATAAAATATTGTAAATCATCCTAAGATTCAAACGTTGAACAATTCAACA
ACATGAGGAACAAAAAATTATGTACAAGTTGGAGTGAAACCTCCAAGATTGCATGGCAAAATTATACACT
ATGTGTTGTTATCTTCAAATATCAAAAGCAACGCGTAAGTGAGAATGAAGCACTTGATGAATCGACACAT
AAAAATATTATTTTCATAAAAGATAATACTCTGCACGTTAGAAACAAAGCAGCAGGTACTATGGTGTTAA
AAAAATAACACAAGTTGGAAGAAAATGAAAAAGGAAAAATACACGTTGCCAACTATTAAGTATTGTATAA
AGTTTCAAGCTGACGCCCCAGACCTCTATATATAGCCCTGGTTCGTTCCTTTCCAAAGCACCATCCCTAG
AACTCACTTCTTCCTTCTTTCTATCTTGTTTTCGACTGCAAAGCTCTTCCCTTTCTATCTTGTTTTGCTT
ACTTTTCA
Sequence ID: 152
Sequence Length: 3102
Sequence Type: DNA
Organism: Poplar sp.
TTAAAAAATTATTAAATCATTCTAACCATATATGTGTGTGTGGTTAATTATTTTAAATAATTTGAAAATA
GGAGAAATAGCTATTTTATTTTAATTTTTTAATTAACAAAAAATCATATGATTAATCTCGAATATCAAAC
ATTTAAGTCTGTTCTTTCTATCAAGTATCAGTGAAGAATATTTAACATATAATTGAATAACATAGATGCA
ATAATAAAAGAAATAGTAATGAAAAAAATATAAGCATCTCAAAAGCTATACCAAGATATCGGAGTGTTTT
TGCACGCCTTTTCAAAGAGAGGTAGGCAGTAGGCCAGACTAGGCAGGTTTACAAAAATAAAAAATAAAAA
ATTGGGTCCTCCTCCAACAAATGGGCGGCCGCTGAGAATTTGGAGTCGGACCAATGACTCCTACCTCCAC
CTTTAATAATTGCTAGATTTCCAGGTCTTCACAGGCACAAAGTTTTAGCAGTGTATTATTTTAATTTTGA
CTTTGATAATAGTTTCTGCTTTGACCACCTAACTTCTCCATGGCTAGCCAACCATCTTTAAATTTTGCTT
TTATTCAACGCATGCTGCCCAGAAATTTAAAAATGCTCCTTGTTTGACCCTTTTTTGCATTACTCATGTT
ATTTAATAATTGTATTGTGTTTGTTATGTCATGTTATGATGAGTTGAAAAATTAAACATAATTAATTGTT
TGATAATGAACTTCTATGTTATATTGTTAATAAAATTATTTAAATTAAAGAATTTATTTAATGAATTAAA
TATTTTACTAAAAATGCCAGATTGGACCAAGAATTGTTATATACTTTATACCCCGTAAAAATGAAAAGAC
ATTAAAAAAAAAAAAAAAAACAAGAATGGCCGAGGACGTCATCACATAAGTTTAATATATTATATACGAT
GGTGCATCAAGATACATATAAAAAAGACCCAAATAGCCTAACCAAGGATACATGTAGCCCAGCCAAGGCT
CTTTGTTAATGCCTGAACCGAGGCTGCTTGTGGATGGCCTAACCGAGGCTATTGGCCTAATCGAAAGAGA
GAAGGAGAGGAAAAAAATGAGGCAGTCTACATATCCAATCGAACCCATGAGTCCAGCCGAGACCGAGAGA
GGGAGGAAAAAAGCTGACCCAATCAACCCCTCTGTAGCCTTCAAGATTAAGATATAAGATAAAAAATAAA
TTATAAAACTTGAATTAGCCCAACTGAATCAGCCCAACCTTGGCTTAATTCAACTTAACTCGAATTATAA
GATTAAGATATTTTAATAAAAAATAAATTATAATAAATTATAAAACTTGATCTCTAATAAATTTAATATT
AAAAGATAAATTAAAAAAAAAACTAAATTAAAAAAATATATCAAGTTATCAAATTAATAACTTGAATTAT
AAGATTACATGATTCTATCCAAAACAAATTAAAATAAAATATAATGCAAAACATAACTCTTGCTTTATCC
ATTACCATGACATCATATGTGACAATTCTCCATTATCTAGTAAATCTAATAATGAATTATAAATTTTTAA
AAAACTAAATTATAAAAAATAAAAAAAATTAATAAATTCAATATTTCAACAAACCTTGTTTTATGAGGAT
ATATATATATATTTGTTAAATCAAACATGTACAAATTCATAAAACAAAGGACATAATCAATAAGAGCTAG
CAGGGAAGAAACGGAGAGGAGTTGTGGTGGTAGCATTGAGTGAGAAAAAAATAATAATGGTCTGTTATGG
TATGAGCCCACATGCTCTTTACAGATGGCCATGAGAAGCTTCTATTGGCCAATTGAAAGTTTGAAACATC
TAGACCATTTCCTTTGTTTTCCCCTGAATATGTAGCATTGGGTTTCATAAATACACTGGACCGGACCATC
AAAGCCTTGTCTGGTGGACTAAATTGCATCATTTAAACATTTAAAGGGCCTGATGCATAATTTTGACTGT
GACACCTAACAGGCCTACACGGTCCAAACTCGAGGGACCTGAACATCTATGGGGCCTTCAGCTAGTTTAG
GGTTTCATTTTCGATAATGGAAGCTCCATCCCTTTTCTAATAATTCAAGTTTAAAGTTTCTCCTAAAAGC
TCCACTGTGCAATTGAAGATTGAGTGTAAAAGACGCTCCAAGAGTCATTTTCGATCACATTGACATGCCA
ATCGAAAGTGTTCTTTTTTATTATTATTATTAATGTGAATGTCTGGACTAATTTGCGCGTATTTTGATTA
ATTCTACGAGCCATGAAGTTAACGACCATGTAAACTTCCAATGACCCTGAACTTTATGAGATTCGAATTG
GTAACTTCTAGAAAACAAACTTAAAACCTGACTAGATGAGTTACACTCCTCGAGACTGTGTTCTTCTAAG
CAGTGGTGACCATGCCAAAAAAATCAACCCATGCATGCATTCTGGTATCAATTTCTTAGAAAAAATTGAT
TTTGAAAAAAGAAGGTTACACATAATTTAGGGGCATGGTTCACTTTCATTCTTTTTAATGCACTTGATGA
CATATTTTCAAGCTATTAAAATTTTAAAAATAACCGCTATCTTCCTTTCCGGCACCGTCCGAGCCCACAA
CACTACAATTCGTTGCCTGCCACTTCATCCAAATGTGATGTGAACTTAAATGAGTAGAGCCCATATGTAT
GAGCTTAACTAAGATCATCTGGTCAATAGCCGAGCACCACAAGGGTGGTCAGGTGCATCTTAAAGGGGCT
TGAAAGAGAGAGTAGAAGCCGAAGCTCGACTCGGCGATAACCTCAAATGAACTAGTATCACACATCCATG
TCCTCCCGAGGATGAGATAAGGTCCTGGAGCTTCTTCCACGTGGCAAATCCATTGTGGTGCCTAACGATA
AGGCTAGCATTCCAAGAATTTCCACCCTCATGTGGATAGAATGGTGTCATGTCATCACTTATCATATCCA
ACGGTCACATTTTGCTCATTATCAACCACGATAGCTTGTGTCCATAGGATATGAGATAGACAAGTTGAGG
CATTATATATACGGTGTGGCAGGAGTACTTCAATCTTACAATACTAGCAAAACCACATATAGAGGGTGTA
ATAGCTAAGTAGCCTGTAAGAG
Sequence ID: 153
Sequence Length: 3009
Sequence Type: DNA
Organism: Poplar sp.
ATTAAGATTTTCAACCAATTATTGCCATTCAACTTTCAACACCCCACCACAAAAAAAAATAAAATAATAA
TAATAATAATAATAAGACTCTAATTAATATAATTAATATTGTGAGGTGACCTTAACTGGTTTTTCTATCT
TTGATTCCTAAAGATCATCAGTTCGAGTCTCACAAACCTCAGGATCATTGGAGGTTTACATTGTTGTTAA
TTTCAGGGTCCGTGAAGATTAGTCAAGGTGAGCGCAAGCTAACCCGTACATCCACGTTAATAATAATAAT
AAAAAACTTTAATTACCCCACGCGCATATATATATTCAATTTGTGGTTTCAAATAAATTACAAGAACCAA
ACATTTTCGTGATTTTCTTTTCTTTTCAAATAAATTATAAGAGAAAATTAATGCTAACTATTAGTGTAAT
TTAATTTAATTAAAGTCCATATGGGAAAAGGGGCAACCCATAGTCTAGAAAAAGGTGAAATTAGAGAGGT
GGCATCCATGCAAGAAAAGGTCCAAGAAAGCATGAAGAGGCGGCAGTGCGTTCAGACATGTAAAAGGGGA
AGAATATGAGACCACTCGCCACATATACATCCCCCTCGAAAACGCCGTTTCAAGCTCCCGGTTTTCAGGA
AGTCTTTTTCGATGGTTCCATCCCATTTTCTGAGCTAAAAACAGGTGACTGGTTTCTGGTTTTTTGTGTA
TGAACATTGGCGATTAATATCTTAATCATGATTAAGAGAACACTTATAATTATAATCAAGGGACAGCATT
AACTAATTTAGTTGATCTCAATTACATCACGTAATCTTAGGACACCCAACGTGGATTAAATTATGTATGT
AACTTGGTAGAGATTTGCACTCGAACCCTAGATGGTCGGCAGAATGTACTTTTTTTTTTGTGTACAACTA
AGAAGGTTCTCTTTTTCTGAGTTTGATTGCTTTTATTTTTAAATATATTTTTTTTGAAAAAAAGTTCAAT
TAATTTTTTAGTGTTTTTTTACCTCCAATGTACTATGTTAAAAATAAAACACACACACACACACACATAT
ATATATATATATATATATATAAAATATTTGTTTTTGGCTATTAAAGCCATGGTGAGTCTGTGATACAAAT
TTTAATCAAATTGCAAATTCAAGAACCTTAAATTTAGAGTCACTCTCGCTCATTCAAATAAATAAGAGAT
TTTAGGAGGGAATCATATCAGCATCCAACCTATCCATCAATTTTAATCGGATCCCAGAACTACAAATTAA
TTTTCCCAATTGAATTCCTAAAGGATTGGACATTTCTCAATTGAGTATTCCAACAACTATATTTATTGGC
ATTTTCCGTTATTTCATGCAATAAATAGCATGAAACTATTTTGAAAACAATTTGACATTTTTCTATTAAA
AAGCTACAATGATGTCAAATGAAACAAGAATTTCCTAACACGTGAGAATTTTTTTTATAAATTTAATCAT
TAGAAGTTCATAACACATTGGAGTCGAAAACAAAATTCTTACAAAATCTTCACCATCTAAGTTGTCCATA
GCAAATTACATTTTTTACAAGAGCGATAGCGTTTGAAAACGCGGGATAACTCGCTTTCTAAAAAGTTTTA
ATTTTTGTTTTTTGCTAAAAATTAAATTTTTTTTTATGTTTTGAATTGTTTTGATACGCTGATCTTAAAA
ATAATTTTTTTAAAATAAAAAAAATTATTTTGATGTATTTCAACATGAAAAATACTTTAAAAAGTAATCA
CAATATTCTCTCAAACAGGTTCAAAATAAAAAAAAAAAAAAAGAAGAAGAAGAGGGAGTTGCTGGGCTGT
TTAGTAATGTGTAACGGAGGTGAGATTATAATGGGCGGAAATGGTTTTAGCCCGACTTCTCTATAGAAAT
AGCCATGGGCCCATGGCATTCTTCTTTGGGCTAATTTAAATTGCTAGACCATTTTCTTTTTTTTTCCCTA
AGAAAGTACTGGACCAGACCATTAAGAACCCTGTCCACTCCTTGTTTACTTGGCCATTTTCAATGCATAC
TGAGCTGGATTTGATCGTTAGAGGACCTAAAGCATTGCTTACTTGTGACCACGTATTGCTTTAAATTTTG
AGGTTTTGAGGGTGTTGTTTTTTAAATTATTATTTTTTATTTAGAGTTGTATTAAAATAATATTTTATTT
ATTTATTAAGATTTATTCTTGACATCAAAATAATAATAAAAAATATAAAAAAATAATTTTAAATAAAAAA
AATTAAATTTTAAATAAAAAAAATTAAATTTTAAATGATCTTTATTTGGATCGCAATTCCAAACCAATAC
TAAAAACCAGATTGTTGAGCTTTCATGAATGTTTTGGTTTTACTTTCCATAATGAAATTGCTCCAATTAA
AAAAAAAGAAGGTAAAATCTAGTGACTCCAGCCAAACCTAATTGGTTAACTCTAAATTTTTTTATTTTAA
ATATGAAACAATATTATTTTTTAAAAATCTTATCGACCCAAATTGACATTAACTTTTTTTTTATATATAT
ATATATATGAAGTAAACTAAGCTCTAAAATCACTGTGTCAATGGCAAGCTGCCAAGAACCACAGAAGTGG
TAATAAATATCTTAAATTAAGGGAGCTGAAAGAGAGAGTGGAATTAATCGAAAGGCTGCCTCAGCAAGAA
CCATAAAGCCATAAATTAACTAGCATCACACATCCATGACGTCCTCCATGGGATGAGATAAGGTCATCGA
GCTTCTTCCACGTGGAAACCTCTTTGTGGTGCTAACGATGAGGCTAGCATCAAAAGAATTCCCACCTTCA
TGTGGACAGAATAGTGTAATGTCATCACTTATCGTATCGAACGGTCAAATTCCGCTCATTATCAACTCCA
CTGATTTGTGACCGTAGGATACGAGGGGGACAAGTTGAAGCACTATATATAGGAAGTGACAGTAAAGCGA
GTTCAGAATATCACATTTATAGGGAGCACTGCATAGCTTACAAGCTTGTAAGAGATGGCTTCCTCCTCT
Sequence ID: 154
Sequence Length: 3201
Sequence Type: DNA
Organism: Poplar sp.
TTTAATTGCATTTTCAAGAAGACAAAATATAATTGATCTCAAATTAAAACAGACAATAAAAAATAAATTT
TAAATATGTAACTCTATCTTTTTATCAATATCAACTACCATTATTAATTCCTCTCAATTTTATCAAAGAT
AACAACATAAATAAAAATTGTCTTCCTTAACCCATATTAAAAACATAAAATAATAAAGAAATAAAACTCA
TCACAAATATTAAATTAACAACAAAAGGTCTAAAAAATCAAGAGATATAAAAAAGAAAATAGAAAAAGAT
TTTAAACAAACATACCTTTTAATTTCAGCTAATTAACACAACCGATGTTAATAATTAACCGGAGAATAAT
TGATTCTTGTTTTTTTAAATTTGAGAGAAGGGTGAGACACAATACAAAAATTTAAAACTACAAGTTTTTT
CTTCATGTATTTATAGAAAATTTCTTCTATATTTTTTGTTTTAATAAAAAAGTTGTTGGCCAACGGCTAT
AAAAATAGTCATTGGCCAACAACTATCATTTTGGCCATTTCTATAGTTAAATGTAGAAATGACTGTGAAG
AAAACAAATAGCCATTTTGGCTATTTGTTTAGCTCCTCCGTTGGAATGCAAACAGTGAAGAAATAAAAAG
CGAATGACGTTTGGCTTCTCATTTAGCTGCTCGGTTGGAGCTGCTCTTAGCTTGATCGAATTATTCAGAA
TTCAATAAATTTTTAAACACATATTTTTTTAAAAAAAAAACAGTTATAAACTGATATATCAACACATTCT
CATAGAATTACTCCATGATAAAATTTCCACCGTCGCCATTATTGACAACCTCGCCCAGGGGCTAAAGATA
GCAGACATGCTGTTTTTTTGAGATGATTTGAAAGAAGGTGAGAGAATGCAAATGGTTGTTGTTATTAATG
GGTTCTTGGTCTGTGTATATTGGGGTCCTTGGAGTTTCTGTGGAGTTAGTTTCCAATGTTTTTGGGTTTT
CAAGCTTTAATCACATTTTGGATACTAATCTCATCCTCTTTCGATGAGAGGATTCAAACTGTAATGAGAT
GTTTTAAGCACAAGACGATAAATTTAGAAATTCAAAAGAATTATGAAAGATCATACACTCATCACGACTT
GGTAGTACACATGTCACCTTCTGGATACTAATTTACATCACCACACACCACTCAAATCACACACACACAA
ATATATCATTCTAGTAAAACCAAGAATCTCTCACTTTCCGGGGGCGAAGTTTGTGGCATATGCCCAGGCG
TTGTTGTTAACTGGGTCAGAAAGGTGGTCAGCAAGGTTCTCCAGTGGTCCCTTTCCGGTCACAATGGCCT
GGACAAAGAATCCGAACATTGAGAACATAGCCAACCTCCCATTCTTGAGTTCCTTCACCTTCAACTCAGC
GAATGCCTCTGGATCATCAGCCAAGCCCAGTGGGTCGAAGCTTCCACCTGGGTAGATTGGGTCAGTTACC
TCACCGAGTGGCCCGCCAGCAATTCTGTAACCCTCAACGGCACCCATCAAGACCACCTGTGTAGCCCAGA
TGGCCAAGATGCTTTGTGCGTGGATCAAGCTTGGGTTGCCCAAGTAGTCAAGTCCACCCTCGCTGAAGAT
CTGGGCTCCAGCCTTGAACCATACAGCCTCGCCGAACTTGACACCGTTGCGGGACAAGAGCTCGGGGAAG
ACGCATCCAAGAGCTCCAAGCATGGCCCACCTGGAATGGATGACTTCAAGCTCACGGTTCTTGGCAAAGG
TCTCTGGGTCAGCAGAGAGGCCAGCAGTGTCCCAGCCGTAGTCACCAGGGAACTCACCAGTCAAGTAGGA
TGGGGGCTCACCAGAGAACGGGCCCAAGTATTTAACACGGTCTGGTCCGTACCATGGGCTCCCGGAGGGA
ACAGGCTTGGTGGTTTTCCTCATGGAGACACGGCCATTGCCCATGATCTCAGAGGAGGAGGGGTTGAGCT
TCACCGCCTTTCCGGCTAGCGAAGGGGAGGAGAGGGCCATTGTTGCTGCTGCCATTTTCGAGCTGATGAG
TAAACGTGTATGTATTTGTGATTTACGATTGAAGAGATGATGTTTGGTGGCCGTGGGTTGGAGTTGACGG
TCTTCTTTTTATTTGATCTTGTGGAGATGGTCCTTATCTTAGGATTTCTATGACTGCACTCTTATTGGTT
GGTCACGTTTTCGAAGATCGATTTTGAATGTCGACCTGGCACTCTCTACACGACCTATCATCTCCACGTC
ATTTTGGCTGCCGAAAAACGTATCCGAAATCTGGAGCAATGTTTCAAGATGTGTTTGTTCCAATAGAAAT
TTGCCACATATGCTTTTGGTCATCTCACAATCTATCTCTATTAGCTTGGAGGCAGCCATGAAATCTAACG
TCATGTTGTCTAATGTGCTCTACATTATGTTTATAGCAGTTTTACCTCAAATTAGTGAGAACAGTTAGAT
TTATTGTTTCCTTCTGGTGGACAAGAGTTAAAAAGCACAAGACATGGTTGGTGTAAATCTTGCATCAATT
TATCATATTGATTACAATCTGACAGCAATGCCAATTACCAGTTTTAGCAATCTCCACCAGAAAAAATATA
GGCCTCCAAGAAATTCTGGAAGAAGCATGGCTTTAATGCTTCTTGACATGAGAAAAGGATTGTGTTTTGA
ATGGAAAACTGGCTGCCATTATAGCTAGAAAACACTGATTGAATCCACCCCAGATGGGGAGTATCATTAA
TTTGGTTCAAGAAATACAATTAATGAAGACGTTTTCTTAAGAAGAAGAAAAACTTGAAGTCATTTGATCG
AGATATTCCTGGCTAGACAAGCCACAACCTCTCATTATTTTCATTTCATCAGATATTTTGTGAAGCCATT
CTACCAGCCACTCAATTCTGATAAAATGTATACGTGGAATACTTACAACTTCAGAAATGAATCTAATAAC
ATGGTGATTTAGAGGGTGCCAAGTAAGATAATAAGTATAGAGCCCAAAATCTAGGGCCTCCAATGAGATG
AGAGATTCAGATACCCGAAGATAAGAGCTTCTGCTCTATAGGTGTAGCCCCGTGTAATCCAAGAATTTAG
ATACCACAGAGATAAAGGAACTCAAACGCATAGCTTCCTACAAATACCCCAGCTAGCCAATACTCTCCAC
CACTAAACCCAAAGCTCAAAAAAAATCTTAACTGCACCCGCTCATCCAGCA
Sequence ID: 155
Sequence Length: 3226
Sequence Type: DNA
Organism: Poplar sp.
TTGTTGAGGTGCTGCCATTAGCTTATACTAAACTGTATCACAGGGTTCATTGTTAATGCTACGCTCAGAT
TCCGATTCAAGGAGGGTCTACTGGGATCCTTATACTAATCCCTTGATTGCATAGCAAGAACCACAATCCC
TTATTTACTGAAATGGGTGATTCTGGCCAGAACCAAAATAGCCTGTTGAATTTTGAGCCCTTTTTTCCAA
TTTCATTTGTAGAGTGCTGGTCTTCAAATGACATCTAATCTTAATTTGTATCATGGATTTTATAGAAAAT
ACAAGGGATGCTTCTATTCTGAAAGAATCTTTGCCTGAAGGTGCAGCTTGGGATGATAGAAGCCATTAAA
TTTACCACTGTCATCAACAACTTTTGATTTTGTTATATCATAAAGAAAACTAGTTGATTATATGCAAACT
CCTGGGCTGCTCAAACTACTCTACGATGAACTTGCATGTGTTTTTATTTATTTATTTAACTTTTGTATGA
GCTCCAGCAGACCTGACCTTTCATTACATGCAGGAAGAAATTCTGAAAGTACTTCCTGCCAATGAAGCAA
ATCAATACGATGGACAGAGGCTCTTCCGTCCTGAAGAACTCATAGAGCTGTGCTTTAAAGTTCAAAACCC
AGAGCTTGCATTGCGGGGCTTTGATGTGTTTGCATGGACTAGCTCCTCATTTCGTAGAAGTCACAGAAAC
CTTCTGGAGGAGTGCTGGAAGAATGCTGCTGATCAGGATGACTGGGGTCAACTCCATCAAGCATCTAAAG
ATGAAGGGTGGAGTGATGAGGAAATCTTGCAGCAACTGAGAGATACAGTGCTCTTCCAGGCATCAAGCAG
TTGTTATGGACCCAACGCAGAAATCATCGATGAAGGTTTTGATGCTGTCTTGCCATTGAGAAAAGAAAAC
TCTGGAGTTTCAGCATTGGAAGATTTGGATTTCTCTGTAGAAGCAATACTGATGCAGCACAAGGATTACC
CTGATGCAGGAAAGCTAATGCTGACAGCAATCATGTTAGGAAGTGTACATGACAATTCAAAAGTAGAAGA
GAATCCTTCTTCAATGGAGTAACTGACATTGTTGCAGTTCATTCCTATGGATTTTTGTAGATTGAGTAAT
AGAATCTGCAAAACATTATTAATATTCTAGTCTGAAGTTCTGCCATGCTTTGTTCAATCCAATTCAGCGC
TGCATATTTATTATGAAGTTTGAGATTGTGGTTGCGCTTGTTTTTTAAAATATTTTTTATTCAAAAATAT
ATAAAAATATATATTTTTTATTTTTTTAAAATTATTTCTAACATCATATTATTAAAATATTTGTATTAAA
CAAGAAAAATATTTTGAAACCTGTTTACATGCAAAAGAAAGAGATCAAAATTGGTGATGACATATCCATA
GGCATGGATTCAAGCGGTTATATATGAGTTTTCAGTTCTGCTATTGTTACCGTCCTGGGTTTTTGTTAGC
AAACTTAGCATAAACAAATAATAATAATAATAATTATTGTATGAACAAGGACATAAAATAAAATCAGTTG
GATCAGATTCTAACCATTAGTTACCATTTTTTAATTTGCCTATGAAACCTTGCCTCCAAGCATATATTGT
TGGCTTGCCTATGCTGAGAGTCATATGACTCATATCTATTTAAAAAAAAAACAAAAAAACTTAAAAAGAG
ATATTAGTCATAACTAATATTTTTCTAGTAAAAAAAAATTAAATCGTGTGAGAGTTAATCTGAGATAACT
TGGTCAACTCAATGAGTTCAAACGACTGGTAAAAACATAATTTGACTAAAACATATTAAGACGACAACAT
ATAAAGTTAACTTTTTATGTTAAAAAACATATATCGACTTGAGTTAACATGAGTTAACTTTTTAAATTTA
TGACCCGGGTCTTGAGATTATGATAACCTTATATAAAGTAAATCAAAATAAATTATGAATTTCAATTTCC
AATGTTGAAGAATGAATCTTAAAAAAAAAAACTAAAAAAAAAGGATGAAAAAACAACCCAAGTTAAACCG
AGTTAATCTGTCTAATCCATGATCCGGGTCATGAGATCAGGGTAACTCCATAAAAAGTAAATTCAAATAC
ATTATGAAGCCTAATTCCCAAACAACCCAATGATGAAATTGAAAGAAAATTCAATTTTAAAAAAGAACAC
AATAAACTCGAGTAAACCCACCAAACTCATGACCCGTGTCATAATAACAGGATAACATCATAGAAAGTAA
ACTAAAAAAATAACCCGAGTTAACACGGGTTAACTTTATAAGCTTGTGATTTGGGTCATGAGAAAGATAA
TCATATAGAAAGCAAATCGAACACATCATGAAGCCTAATTCTCAATAAACTCATTGTTGAATGATGAAAT
TAGAAAAAAAATCAATATAAAAAAAGATACAATAAAATGACCTGAGTTTACTTGAGTTAATTTGCAAGAT
TCATGAGACAAGGATAACCTCATAGAAAACAAATCGAAGCAAATGACAAATCCTAATTTTTAATCAATCC
AATATTGAGAATATTGAAAGATAAAACTAAAAAAATAAATACCAAATAAAAAAAATTCAAGTCAATTAGA
AGAACATGTTAAACTCATAACAAGATATTAATATAAAAAATAAATCATAATAAATCACAAAACTTATTTT
TTAATAAATCAAATGTAAAAAAAGAAAAAAAAAAGAAAAACATAGATTAAAAAATTACTGTTGCAATTGC
AATGAATAATAATTTGTAATATATTGCGAAGTAAAAACACCTCCTCTTTAATTTTTTTTTAATATTAATG
TTAATTGGCTGATTTGACATCTTTATTAGCCATTTCCATGTAGAATTCTTTTTTTTTTTTCTGTCTATTT
TGTTCTCATCGATCGAGGAGCATTAACCACCCAAATAAATCTTTTGTTTTAAATTTAATCTCTATATAAT
GTGGCTTGAATCGATGATAAGCACCCCACCAACAAAGATCTTTCAACTCCACATGGCATAAGAGTAGCCT
ATATTTTCTTGGAAAAAATCGACATGGAAATCCACATCCTATCCAGTAACCAATGGGATACCGCTGACGT
GTAGATTTCCTAATCCACAACATCTTGTCATTTCATATACATCTCCCCTCTTCCTGCGTTGATTAGCATC
TACACTCAGTCAGCCTTGATAGAGTAAGAGAAAAGCAGAGCAAGCAACTTAGAGGCAGCATTAACAAAGA
AGAGTC
Sequence ID: 156
Sequence Length: 5170
Sequence Type: DNA
Organism: Poplar sp.
ATATATATTTTTAAAAAAATACTTTAAAAAAAAAACGGATATTGATTGAGTTTAAACAAATGGATGGTAG
TCTTCCAGAGACAAGTACACAATTCCATATATATATTAGCAGCACTTTTCGTGTACGATAGTGATATCTC
ATGCCAGGCCTCGATAAGAGCTCTGTTCATTTTGATCCATACACATTCAAGGGGAATCTCCTTTATAACC
CAAATTGGATGGTGTTAGCAAGTGAATTTGAGCAATGGGCATATAACTTTTCGATAAGATAAACCCTAGC
TAGTTTGCATTTTTGACTTGAATTACAACAAGAAGAAGAAGATGGCGTGCGTACGTGGTGATTCCAATAT
CCCATGCTAGCTAAGATCGTAGTTGTTACAATTCAGTGCAACTCTGATCAGTTCATGTTCAAGATCCAAA
TAATCACTTCAAAGACTAATTCTAAGTGATTACTTTGAATATTAATTATGGATTTGTAATGCTATAAAAT
GTCTGAAGATAGATAGATAGATACTCGTAACTTTAATGTACGTACGTACGTAGACGTTCATGAAGATTCT
CTCTCTGTATATATTTCCAGCAACCCTATAATATTGCTGTAAAATTCTTGCTGGTTCATCTTTACATTTT
AGAACTCGTCTTCCATAATTTGCATGTATTGTGATTAAATCCACTTTTTTCGATTTTTTATGTATAAAAA
AGAAGAAATCAAAGGGAATAATATTACAGATAGAAGCCATCGAGAGAGAATGGCTGGAGAAAATAAAAAA
CTGCATCGATCGCACACTCTGCTGCAACTCAATGCAATAAACAGGAAGACAGCTGCAGATGCTTGATGCC
AGAAACAAAAGTAGAGAAAAGGTTAAATTCAACGAGGAGGGAGGAAACAAATTAATCACCTGGCTCCTTG
AAATCGCCTATCAAATCTTAAAATAAAACATGTATTGAGAAATTCATGCTAACAATTTTTAAGAAAATAG
AAAGTTTCTTGGTAAATTCAATGCTGACAGGAGTCAGGAGCCCTTAATTAGGTTTCGAACCTGGACAGCC
CCGCTCCTGCAAAAGGACTGGGTTTCTACCGATCAGTTTTTCTTAATTTAATAATTTAAATTATTAGATA
AAATTTAAAATATAATTTATATTATTTTTTAATATATGTTTTCAAGTGAAAGCTCTTTGATCTTGAAATT
TACACAGATTTATATTATTTTGTGCTTAATTTTTATCAAATAAATAAAAATGATAAGATTCGAATAACTC
GTGATCGTTTGATTATTAAAATTTTGATAAAATTTCAAGATTAATATATTATTTTTTTAACATGATATGA
TATATATGTAATTCTTTAACATGTAACTTTGAATTAAAGCTTGAAGTGAGAATTGCATATGCATTGAATT
TGGCTTCAAATGTCTTAATTTTTATTCTTTCTGCACTTGTTTAACATGTAACTGAGAATTAGAGCTTGAA
GTGAGAATTGCATATTATGCATTGAATTTGGCTTCAAATGTCTTTTTATTCTTTCTGCACTTTCTTATTT
TAATTTATTCTTTCTGCACTTTCTTATTTTTAACGCGCGTGATAGCATGCAAATTTCCAAATTTATGCAT
CTCGTCTCTTACTTCAAATTGATGCTCTTTCCCAGCTTGGAGAGCTGCCTGGTTCAATTCTACCCACCAA
CTTTGACCAATAAAAGGCAAAAGCTGCAAAAAAAAACATCACATGATAATACCTGTTTTGCCCTTTACAG
AAGAGAAAAAAAAGCTAGTTGGGATATAGGTAGTAATTGTTTTTCAAAGTGTTTTTTATTTTAAAATATA
TTAAAATAATATTTTTTTATTTTTAAAAAATTATTTTTGATATCAGCATATTAAAAAAAATATACAAATA
ACAAAAAATATTAATTTAAAAAAAAATTTAATTTTTTTTTAAAAATACTTTTAAAATACAATACTAAACA
CGCTAACGATAATCTCCTTATTACAAGCTTAGCTATGCACATTATCGACAAGTTGAACATCATGCCAAAT
ATCCAATCTATCATCACCAACTGCTGGTTCAGAAATCCAGATTCCGGCGTCAAAATTCTTGACATGGGTC
AACGATATGCTCCAGTTGCTTACCTGTTTAATGTCAATTTTCTATTAAGACGGTGGGATCCAAATATTTA
ATTACTTGCCAGCAAATGTAATCTGTACTGGTAACGATGGATTGTTTTTGTATGAGTTTTTTTAATTGAA
AATGATTTTTTATATTTTTTTATATTAATATATTAAAATCATTGAAAGTAATTTAAAAATCATCATTTAA
ATTTTTTTAATATAAAAAACACTCTGAAAAATAAATTAAACAACAATAAAAGATTTATTAAATATTTATT
TTTGCATTATAACTTGCTTTTTAAATTAATTTTTAAATTGTTTTTTATTCGAAAAGATATTAAATGGATT
TTTTAGATGTTTTTATATGATTTTAATATATTGATATAAAAAAAATATAATAAAAATTATTTCAATATAT
TTTTAATTAAAAAATATTTTAAAAAAATATTCTACGCTAAAATATTAACTAAATAATATTTAAGCATTCT
ACAGAACATTAACTAACAAACTAAGCAAAGGTTAAACAATTAATATTAATTAATGTGAAATCAACTTGTT
CAAATATTTTATTAGAATAAAGAGGAAAAAATGGTAGAGGGAGGTCATAATTATAGCAAATTTACAGCCC
TTAGACACATACTGGAGCCTCCAACACACCACCCTGTCGATTTTACCTGGAAATTACTCGAGGCTCCCTG
CTTGGCCTCTCGTTTCGTTTATCATGCATGAAAGAAAAATAACCCAATTATTTTAATTCCATAAAATACT
AAAAAGACAAAAGAAAAAACACGACAACCAACTTCCTCGTGTCAAGATCTTGAACCATCTAGTAAACCAA
ACTTGTTCGACCTTTAACACCTGACATGGTATAAAAACCCACTTCCCTTCCCTCTCTTACCCTCACTGCA
TATCGCAATAATTATTAGCGCATCTCCATTGCTACAGGAAGTTGGTGCTCCTCCCCCTATGAAGCAAGCA
TTCCTCCTGGAATGCACTTCTATTGAGTCCGCAAGAAAAAGCAAGGAAAACCCTGCTTGTTAATCATAGT
CTCCAAGCTCTTCAACGCACTTTTAGAAGTCTTCTCAAGACATTTTTTGGTGAGTTCTTTTTCTGTGTAT
TGAGAAACAACGAGAAACTCGGTTGTTTCTATGATCATTCTAGCTAGTTTAATTAGTTTGTCTTGCGCAG
AATATCGAGGAGACATGGTAGCTTCACGGCTAAGATCTTTTAATGTTTGAAGCTTCTTTTTTTTTTTTAG
CTCCTTTTGCTCTCAAATCTTTACCATCAACTTTCCTTTTTGGAATTTTGTTTTGGGTCTTTGGAAGTGG
GATTTTATGTTTCTGAATCTACAGACAAAATTGCTTTAGAGCTAAAAATGAACAAACAGAAAGTGTGAAA
ACATTGGAGCCCCCCCTCTCTACTTCTCTTATTTATTTTTTAATTTTTTCAAGTCCTTAAATCTATTTTA
TGTTTTCACTGAACTCCTTGAATTCTATCTAATTTCCGAACAAGATGCCCACAAAAATCTGAGTGTGATA
TTGTTCTTTTTTCACAGGCACACGAAACTTGAAACGCTGACTAACCCAAAACTCCAAAAACTTAGATTTA
TTTCAGTGTCATATACATTCATCCATTTTTCTAATACTGATTTTAACATTTATTTTTCTGGGAAATACTT
AACAGTCCCTTATATTTGATTCTTTGTATTTTTGAACCAGTTCTTGGAAATTAAGGCTGCAAGAACAATT
GGTGTCTAGTTTGTTTGTTTTTTTTTTTAAAAAAAAAGTGAGAGAAAGGAAGAAAGACATAAATGCTGAG
GATTTTAAGAGACCAACAACAACTGAAGTGGATACCTTGTAATAGTTCGTTGAAGTGGAGGGAGTGGAGA
AGTTACAACAATTGTCGTAGAAACCATCAAACTAGCATCCGCATGAATTACCCTTTTTCCTCGTATTAGC
TTCCGATCCAAAAATCACACAAACCCTTTAGGTCCATATCTAGTAGTCAACCATTTTATACCCTTGGTTT
GGTTTCTTATTATGTTTGTTTTGTGTTTTTTTTTTTTTTGGGTGTGCAGTAACTAAGTGTAAGACAGCAA
CAATGACGGTGACACCAAAGATTTCAATCAATGATGGGAACCTTGTGGTTCATGGGAAGACAATTTTAAC
TGGAGTTCCTGATAACATTGTTCTGACTCCTGGCTCTGGTGTTGGACTTGTTGCTGGTGCTTTTATTGGT
GCTACTGCTTCTCATAACAAAAGTCTCCATGTTTTTCCTGTTGGGGGTTTAGAGTAAGCATTTTGAAGCC
TTTCCTTTCATTGCTGATGATCTTAGGTTATGCGTTTTTTTTCTTTCTTTTGCATTCTTGGAGATGCTCA
CTTTCAATTTTTGTGGCAGGGATCTTCGATTTATGTGTTGCTTCCGATTCAAGTTATGGTGGATGACCCA
GAGAATGGGGAAGTGTGGGAAAGATATTCCACTGGAGACTCAATTCATGCTAGTGGAAAGCAAGGGTGGT
GGTGAAGAAGTTGATCAAGATGATGCACAGACAATCTACACTGTTTTCCTTCCCCTGCTTGAAGGCCAGT
TCCGTGCTGTACTGCAAGGCAACGACAGGAATGAGATGGAGATTTGCCTTGAGAGCGGTGAGTAGATTAT
GGCAATTAAAGTGTCCGGTGCAACGCTAATATGTACCCACCCATGAGCCTAATCTCTCATTATTGAGACC
ACATCACAGACTTATGGGCTGTACCTGTCATTAGTTACCCTACTTCATATGGTCGAAACTACTGTTAATT
CAGTCTCATCCTGTCGGTCACTAGTGAAGGAGACTAAATTCTGAAATTCTGGGTTGGGGCTGTCATTGAT
GTGAACACTACCAGGCTGGAGAACCAATCAATGACTCCACCATCCAGATGAATCGTTTTTTTGGAGTTCC
TTTCATTTGGAAGAAATAGATAGAGAGGATCGAGTTTGAAAGAAACCGAAACGATGCGTTTTTTTGTGGT
TGATTTGGTTTTGCAGGCGATAGTGCTGTTGAAACCAACCAAGGCCTTCACCTGGTCTAC
Sequence ID: 157
Sequence Length: 3000
Sequence Type: DNA
Organism: Poplar sp.
GTGAATCAAGGTTGTTTAAATCATAATTTAACCCATAAAAATTATATAATTTTACGAGTTAATATATGTT
TAACATGCAGAATCGTATTAAAAACTCGAAAATTAATAAAATCGGGTTGAAATCGAGTGAAATCGGTAAA
ATTAAATGAAATCACAATATATATTTTTAAGATACTTGAACTATATATGATTTTTTATTTGAATGATGTA
TTTTAAGATGTTTGAAAAAAAATTTTCTTATAATTTTATGATTTTACAATCTATTTTTGTGATTCAAGTT
TATTTTATATTTTTTATGTTATTTTAAAAATATATTTTTAAAAACCTTGATGTGGACAGTACACCAGTAG
TAGCTGACAAGATTTTAGTCTATTTTAAAAATCCCGTATTTTATAAAAGAAAAACACACAATCATTAACG
AGTATGAGTGAACAATCAGCAGCCCAAGCATCCTCCTCTGCTTGCCAAAAATTGTTCCTTTTTTAAAAGA
CACGTCTTTGTTCCAAAAACAATATCGTAGTATATTAATAATTCGCCAAAATAATTAACGTTATATTCTC
TCGGTGGGCCCCGGATTGGTTGTGAAACACGATGATTAATGGGCCTCTTCTCTTGACAGGATAACAATGA
TTTAGGATATCATGTGAGTAACAGTTATTTTTTATTTTAAAACATATTAAAATAATTAAAATATAATTTA
AAGTAAAAAAATTCTTTAATTTTTTTTTGAAATACAAAAATAATTTTGCTGTGAAAGTGAGACGGTGACA
ATATAAGGATTTTAGAAGTTTAATTACGGTGTAGAATAATCATTTCAACTTAATAATTTAAATTGTTAAG
TAAGATATTAAGATATAATTTATATTATTTTATAGTATATCCTCCCAAAGAAAATATTTTTAAATTTAGA
AATTTACACAGATTAATATTATTTTATATTTAATTTTTATCAAATAAATAAAAATGATGAGATTCGAAGT
AGTAATGGTTTGATCATTTAAATTCTCATATAAAAAACACCTCATTTTAATAACTAAAATTATTAAATAA
AATTTTAAAATATAATCTATACTGTTCAAGGCTACACGATGTCATTAATTTTATAGACGCTGGTCCAAAT
CAGTAATGCATACACTTTGTACGCAAGCAAAGCAACCAAACTAGAGAGAGGAAAGGAGGAGAGGGCAGTA
GCGTGGAAAGGGAGGGAAGCATAGCTTAAAGTGTCGGCAAACGTTCTGGTTGAAACTTCTCGAAGAGAAA
AGGAGAGAGAGGGTAACTGGTGGTTAGATAGAGGAGGAGGATGCCCCCATCAAAAACTATACACTCTCTC
TTGCAGATTGCTCCTCCAAGAATGAAAACATGCTCAAAATCACCATCAGTTTTGTATATGTGTAGTTAAT
TATGCATCTTCCTGTAGTTTATCAACAATTTACACAGCTTGAGGGGACAAAATTAACTTGTTGATGTGCA
TAATCGATAATTCCTTCTAATCCATGTAAATCAAACGGGTTACAGTGATCCATGTACAATATATTTTTTT
TTAGTTTAACGTGGGTGTCCGGGTCAGCTTGCGCGCACCTCGATTAATTTCATGGACCCTGAAGTTAACG
ACCATGTAAACCTCTAGTGGTCATCATATGAGCAATTACAGGGCTCGAACCTGAGACTACAGAGGAAACA
AATCTCTTGGTCCCAAGCTTTTACCACTGGCCCACCACTAGATGGTTGATCCATGTATAATATTGTATGT
ACACGTTCTTGTTTATCTATTTTCGAATATAGCTGAGATTTAATTTTTAGAAATTACTACTTCAAGTATT
ATAAATCTCGGATCATTAAAAGTTTATAATTATTATATAATTATTAAATTTAAAATTTTAAAAAATTAAT
TAAAATACATGTAAATTAATCTAATACTACAATTAAAAATAAAAAAAAATGATTTGTCCGCTTTGGAAAG
TGAAAGGGATGAGGTTCCTTACCATCGTTAGTTGGATGGCATCTTTTCATTCACCAACACTAAAAAATTA
CGATCAAAACCAACCCCACTTTACAAGCAATTATGATGTCTCCTCTCTTCCCCAAAACTGGAGGTGCTAA
AGACCATGGAAAATTAATTGTAGTAAATTATTTTTAAAATGTTTTTGGTTTTGAAATTATATTAAAATAA
TATTTTTTATTTTTAATATTAGTTATATTAAAATATTAATTTAAAAAATTAAAATTCAAAATTTTTAAAA
ATCCAACTTCAAAAGTAGGTGAAGCCCTAGTCTTAATTAATATGTCAGTTTGTTTTTATATTTAAAAAAT
ATTTTTAACAGAATTTAAATTTTATTTATTAAAATGAACAAAAAATTATTTTAATATATTAAAAAAATAT
TTTAAAAAATAATGGGATTAATAAACACCATGTGAACGGGTTGAAGTTCTTGGAAAGCAAATTCCATTAC
CAAATTCTACTTTTCTTCTTCTTCCTTTTTTTTTTTGGGCCCACTGTCTAGAGTGAGAAAGAAAGAAATA
CACCGCAGATTTAGCTGTTAGAAACACAGCGGTGGACAGACAGGCTGTCCTTGTCTAGTAGCGGACCGGT
CACCCTCACAACCACATTCAATAAATTCAATAAATATAATTCCGTACTTAAAAATGTTAGCAAAAACGTG
GAATAAAAATAAAAATAAAAACCCCAACCCAACCCAAGTTTCTCACATGATATGATACTGCTTGTTGCTT
GACTCTCCACCGTCATCAGTCTCCTCTGTCCACCATTCATAATAGCCTCCCGCATCCCCACGCTCCATCA
CTCCTCCCCACACTTGAGAAAGAGAGAGAGTAACACAGCTCGCATTTTCTTTTTGTCAATACAGTGTCGG
TGGAGCTTCGAGTTCTCTGCCTTTTTGTTTTTGTTTTCGTTTTCGTTTTCGTTTTCTTGAATTGAGGGAG
GATCAAAAGTAAGGTAATTTACTAAATTAATACAAGAAGAAAGGGTGAAATCTTAAGAAT
Sequence ID: 158
Sequence Length: 1815
Sequence Type: DNA
Organism: Poplar sp.
AGATTCTTCATAGAGGGAGCAAGAAAATAATTATTTTGTAAATGTATAGCTAGAAATTAAGTGGTATCATTCGT
GAAGCTTTATCTAATACTTTAATAAGATTTAGATTTAGAATTTTTATTTAGAATTGGGACAGTTCATTGATATT
GGATAGATTTTTTATGATAAAGAATAATGAATTCTACTAGTATCATCTTCTTGATTTTTTAATTAAAATTAAAT
CATCAGAGGATAATAAGGGATTATGCAAGGTTTAATTTAGTGTAAAAAAGTTTTTTATTTGAAGGAAAGTGATA
AGTATTAATATAAAATTAGTCACCAAAAAAACATAAACTATGAGCTGAGATATTTAGTTTTGACGGAAGAAAAC
TTCATGCCTAAACTGTAATTATTTGAACAAGTATTGAGATAAGTTGTGGGCGTCCGTCGTGATTTATATATCAA
TTAGGATGAGTTGAAGAGTAGATAATGAGAGGAAAAACAAACTAGTAATTAATCACATGACTGCTACAACAACC
AAGCCCACTAATTAAAGGGCTTCTTCGTGGTAGGTACGTATTTCGCATGCAGGAGGCAAGACTCGTTCAATTAA
TAATTATAAAAAAAATAATTAGGAGTGTAACTCAACTGGTCAGGTTTTAAGTTTGTATTTTAGATATTATTAAT
TTGATTCTCTTAAACTTCAGGACCACTAGAGACTTATATGATCATTAACTTTAGGGCTCATGAAATTAGTCGAG
ATATACTCAAACTAACTTTAAGACTTATGTTAATAGAAAAATAAAAATAAAAGAAGTAACTATACAACCACCAA
CATGATGTTGTATATACCGAACATTGCTTTGCTTAAGTAGCCTGTTTAGAATAATATGTAATTAATTATATATG
TTGGTGGAAACGATCAATTACACCTCCTTTTTATTTATGAGATTCCCTTAATTTTACCTGGCTTGAATCCGGCA
GTACTAATTAAATACTAGCCATGTTGTTGATGAACATGCATCATCAGTATACTTCCCTCCCCAACCTCTATATA
TTGCTTTGTTTTTTCTTAAATAGCAATATTTCGTTAGCTGGGAATTAGTCGCACGTTTATTTTAGGTTGCTGAC
TGATTCTAGGTAATAATATCATCACACGGCATGGACAATAGTTATGTCTGACTTGAATTAAATATCCAAGAGAT
AGATAATTACCTCATTATTTGTTGGGGTGTAAGAGAATTTCACTCGTGAGAATTACCGATGATCATGACGACAT
GGGAGCACAAGTCAAGGATACATGCCATTCGGTGAAGAAAAATGCATGATTATTAGGTGGATCCATATGGTATA
CTATTTGCTTTACAGCCCCACGAGACTAATATACTTTATGGACACCGATATTATTCATTTTACATGGCAAGACG
AAGTTTCCCGATTCTCACCAACCACAACCTCACCACCATGCACCACTCCCACGAGTCATATTTACCCTTCTAAG
CCAATCGCCAATATTGATCCACGAAGACTCCACGCTCCATGGTTTGTACCCTTAGATTGTTCCAAATCAATGGC
CACAATTCAGTCTCAACAAACCCACTTTGTCACCTCTTGCCGGCCCTCATGCTTACCTACCATCTCCTGTGCAT
GATATTCAAGACTCCCAAGTCCCAACCCTCTATTTAAACCCCCTACACCTCCCCTCTATTTCTCTCAGGAAATC
CCGTACTCCAGAACTCAAGATTTCCTCTACAGCTACTCCTCTTCCTCCATTCTTCAAGACTCCTTCTCTCTCAT
TTAAGCTTTTCTTTGGTCTAACATATATATAAATAAGAA

[0297] All literature and similar material cited in this application, including, patents, patent applications, articles, books, treatises, dissertations and web pages, regardless of the format of such literature and similar materials, are expressly incorporated by reference in their entirety. In the event that one or more of the incorporated literature and similar materials differs from or contradicts this application, including defined terms, term usage, described techniques, or the like, this application controls.

[0298] The section headings used herein are for organizational purposes only and are not to be construed as limiting the subject matter described in any way.

### Other Embodiments

[0299] Other embodiments of the invention will be apparent to those skilled in the art from a consideration of the specification or practice of the invention disclosed herein. It is intended that the specification and examples be considered as exemplary only, with the true scope of the invention being indicated by the following claims.

The application's sequence listing, which the Patent Office published only in electronic form, follows.

SEQUENCE LISTING (181 sequences)

SEQ ID NO: 1 - DNA, 2450 bp, Poplar sp.
aattgtgttttctgttaggtttccactaacaagtttgttcttagcctaggaggatcttggtgaacccatgaaaaccaggggggccctgtttaagaatgtactcttgtggtgaattatgaagatgatgggaaaaccaacgaagagctttttatcccgtcgaaaatgttagaacccggttattacccggccgggttgattacattgagtaaaatctagttcatctaaaaatagtgaccgagtaatgtcaattatattgagtaattaaagatatttattgacttatatcttgtatgataattttcaggtggttccaataaattgtattacaattcaaggatgattacatgttctaaatcatttttagcaggaattctaaagcattcattagtgagattaaaaggtaattagtgaccatctaacttgaaaccttgctcgagccgagccaagacgagttaataaaaaaacttgatttttttaaagaataatatctttttaattttttaaaaaattaaattaataaaccatgcttttaagttttaacagagtccaccattattgtagctaaaaaagaggagggatatattattgccctcttaaaaaaggaaagaaggaagaggaaagaaaggaaagcagccagcatttttatcctctcctgttctaattaaagaaaatacaaccacaattagcggctgattaattaaaaagtggtcaaccataaatctgtcccacgttgtgtttgttatgcatggcacatcatatgcctcatttagcaagatacaatgtcagccgtttgatccttgattcatccatctagtcaacgacggctcggttgctaggaagcgaaaatcaagggtgttattgacaggtagtggtgggcattacaacacctgaaaagacacaccgacatgatctccagacagttggaaaagcaatgctgagttggcaattaaagttcctttttattttttttattttttcccttttattttcctatgaaataataacgaaaaagaggtctgcttgattataaaattttgctttttttagcggggtcctttttcaaggactaatgtacccctcgacgctgaaatgccacaaccatgccttcatttttgtcaattttataattgagaagggtaattatggaattccaagtacactaatcacgatttcctgtttaacagggtttctaatctaaacttaccaccactagcaaggtaactgtcctgtgaaaaaaagcaaggcaaacacggtcaaagacaatgcaatgaatttaggatgggaatgccctaatttttttttagctaaatttcatttttttacctttttattcccacttgtttagaaaaatacttcagaatatctctaaaatagaataaaaaataaacaaaatattagggtttagttacattgataagttttgtaattgaaagtattagtattttaattttttaaaatgaaaaaaattataccttagcatatgaaactaagataaaaattgatattttttaatattatttaaaacacaaaagctaaataaatattttaatcatatatggatgaatctttaatattataatacattattttttagattagcggatcaaaacgattcaaaatattaaaaaaattaatttttaataaaaattttttgaatttttataaaatataatttataccgcgttgtgataagcaatgaaatggtcaaattgagatttgagagattggtcaataaccttaacaaaaatcccacaattcaagggcttgcctgaccaacatgcccttggccaaggacgagaggtcaaatgaggcattctaacaaatatcaagggcatatccgtccacacaaataaaacaaccgaaagcgagccagctgtgtacacaatgagcatgacgcgtcatggggtccgtagatcagatgctcgaaaccaacggccaagatcatcccaaagcaaatttgaagttcatttaagttgaatttcatccgaggctgaaatttcatttcacatcttccccttttttaaaacaagagggcgggtaccttgaacaaacgctcacacacagcgaaggaagaaagaaacacaaagaacaattcagttttctgaacggtatgctgtttgaatttcaaaattcttcatctttctgatccgggtttagctcagattataacatcattgtgtcaaaccattaaaaaatttgatctttaaatgtgggttaattttattttgtgatttagcattgctaaagttttgatctttgatgtgattttacaaaatgaacattcagattttgattatgatttgtaaaaaggaaatgggatctttttattttactttccattgggatcatcatgctctttttgtcaaaatcgtgcattaaattgtcgtgattccctatttgtatagcattttaatgtaaggtggcattttgaacgtggcaggtgagaggaa

SEQ ID NO: 2 - DNA, 3003 bp, Poplar sp.
ttcggtgcttgtctagtagaaagtggagttcacgttcccattcaattgcctgaggatcgtaggcttttattctagacagcttaaattaatggaaacttagcaacgaggatagttcgtcgtcaaacctttatttcttttcttgtcttgaattatttggaatagttttttgaatcgtattggtttagctaatttgttgaaatggtggcttcgttacgatgtttggtacttttttatttcttttatttccattcgcttgctgttgatgccaattaaggccatgtagcagttgtttactgagtggtgggtgaaattcattatccatgtcacatcagaacttattctgaagcaacacaggctactagctaacctacttgcagactgaaaaaaaggatttggatcataacacaaccccctcttagtaaaataaaactcacatttatgatccataaaagaagtctgctcacaacaggcaacgtgttaatagcctaattcatctagcagatgtctcatgctgctgcatccatccatgagaaaacccacaaattgcagcgccaaaactacatccacgtgcaagctcgttcaatcccttgacattgtatttggtgtttatctaaagcttagaggctggtggaatcgatcattgatgctttgcatacgtggaacattggtgaccaaatcatcattgccaatggttgcattctgctgcttatacggtaaccactttacggggagggaaaaaaaacaggcgtttacaccacagaaaatcgaaggtttcagactttttgctccaaaacgagcccacccttgtgattccaatgctagcattgtccaagtaaaagagaaagggtccgggccatggaagcgcgctccaaccgttatgtgctggaaaacgtagctccacctagtttagaatggtcattttagcacaaaaggcagacgctagactgcatcatttatccaacaaaatctttgattcttccacacctggccatttcataatcaaaggaatgttcctaccctttttactcatgaagggaagagttgtcgcagcgatgcacaggtgcagctcactcaaatactcagatagtgggctgtagcctgtactaatggtatttaaaaataaaatagaaacttgaagaagagtagctcgattagcactaatccatcatctccttcaaaaccatttttttcatattattaaacacatcttcttaagactaacgtaaatacttacatgcatgcatgtgtatatatatatatacacacagtggttgatacttgataccaagtttatgttctagaacagttgtgtgctctaaatagtatggtagattttttaattaatttttgtaataaaattatacttatccacgaaaattgagctactctcgttgttaaattctagttttttcattgaagaggtaaaaaagagatatcctgacagcatatttatcaccgtaagaaatttaataacttatacaaaaaaaggaaaaaaacaataatagtaatttttatgatttgtttagagtatggtagaggttatttttaaagtgttatttatttaaaaatatattaaaattatttttttattttttaaaaattattttttatatttatacattaaaacaataaaaaaaacataaaaaaattagtttaaaactaaaaaaaatcaaaacatttcaaaaatacaccatgccaagcaagaacactacgtacaggtaagatttgtaagaagggaaaaaagaggaggggtaaaatagagaagacaggaaggagaagaaaaaggaaatgactggaaaaccggaaggagctggctggatccagcaagaaataataaccccagatagataggaaatatgaaaaaagaagagcgcatgacgcgttcctctctgtaagttgtgcccacaaaataaaaataaaagaatccaacggcccacaactcatctcgcgttccatatattgagcttcttcctttctctttccaaaagctcaaaaaaaaaaaaaaaacattttagttttgtttgtgtgcgtcgtcgcctcgctcactctctcaaaatccctcctataacaaggtcggtccttttctttttcaatcaatcgctcttctatcttttcgatctgctgtatagcggtctggatctgatctccttttgattctgcattttgctttttagtattttgtaatgtgcgattcatgctcgcaaatcattttttttatctgcattttggattcttcttaatcccatatttggatctggttttattattattcccgggttcgttttgtttaaaatctgaaggaaaattgggaaattaacagtgaagaccgtaaattttactgtaattacaaagttggaaatggattctaaatgctcacttttctttatgtctgtgtctttagatttcgtttgcaattgctttaaaaatgtgatttaacattattctgaaatgatatccgagatttacttgcctattctcttaagtcttttttatgcattttgattttgatgcgatatatttgttcactttatttttcctaatcgatttcttttccgtttttaagacacggaaacacgacggttggtttgccattgcattttctttttttgggggccaatgtacacgacggttggtttgccattgcattttctttttttgggggccaatgtacacgacggttggtttgccattacattttctttttttgggggccaatgttcagtagttagatttccagattaaggtgtttgtgtaataagacatgggatctatagatgtgatacattgatttgcaatgttgctgtttgttttttaactgatgaaggcgaaaaaactcatttgcttgtttgtgttcttttttttttcaatattttattttttactctgttttgcattaatgcatggctagttaggagatgattttgatgtttttgcttcgcttgataaaagaaatttattccttttttgttgattatcactgtttggtattacaggcagtagaag

SEQ ID NO: 3 - DNA, 2000 bp, Poplar sp.
tacgttgaccactggtttttggtttctagatctataaccaaatcatcattgctactggtgacattctaatgcctatacagtatgcaccttgctgggagggaatataaggtgtttacactcaagagattcagaatttccagctcttttgtcccaaaacgcacccacccttgtgattcatatgcttcgactggcagcattgtccatgtaaaagagaaagagtccgtccgagccattgaagcgcactccaactattatgtgctggaaaaggtagctccagctagcttggaatgaccattttagcaaaaagtaaacgctggactatattatttatccaacacaaatctttgattcttccatgaatcatggcttgccatttcataatcaagggaaatttccaacctttttactcgtgaagggaaaagtagtagtagaaatgcacatgtccaactctaacatgctcaaataatggggactgtactgacaggatttaaaaaaacttaaaaaagggtaaatggatgagcactaatcaatcatctcctttgtaatattgaaagagagatctttgcagcacgatatcagtactaaacaattcgattatagttgacgtggctcagaccccgacaaaatttaggtcaatttgcctgtcactatcgatcttacaataaaatccccatatagaaataaaattaaggtagtgtactcccggtaagaaataaaaaaagaaaaagaaaaagaaaaaagaggaggctaaaataaagaaaacagacggaggagcaacaaaaagaaaatgactggaaaaccggaaggagctggatcgagcaagaaataataactccagacagacaggaatagggaagatttaaaaaaaaagaaaaaagagcgcatgacgcgttcccctctgtaagttgtgcccacaaaataaaaataaaagaatccagcggctcacaacgcatgtcgctttgcatatattttgagcttcttcccttctcattcaaaaagagaagaaggctaggcaacccacctcgaaaacattttattttgtttgtgtgctgggcgtcgtctagctttctctaactctctcaaaatccttcctctcctttaacaaggtccatttcttcctcctcttttcgatcaatcgctgttctctcttctcgatctattatttagcagcctcgatctgtgctgttttttattttgcattttgcttcataaagctggggatcttgtaatgtgctgcggctcatgctgagaaatcatttctttttgttcctttaattttgatcgtctgtttggatctgattttgtgatcattttactttttttgtctaaaatctgaaagaaaattgggaaattagcgacgaagaacgtaaaacacattagaatcataatgttggaaatggagttgttgcgttcgcgttttttagtggatgtctatgttttaatttagcatgcaattggtatgttgcgttaaagaagaacgtaatttcgcgagatttgcctgttctctttaatcatttatttgcaggtattcacaaatgcttcgatgcattttgatttggatgcgatttatctgtccattttctgattattttttaattccaaatattttgtttttactagtttttaaaaagacagaaacacgatggttgatttgctatttcatcctcgttaatattaagtatttagttttgtgcaatgagctacgaatctataatgaatgtggtgtgattgatttgttttgtgttgctttacttaatttcaaaaaatatatatatattatcctctgcttcctttgttgtgttgctttactttactttatgctagttgcaaaatctggtttgattctgtctaataatttgaataaacagtgtcatgtacttattacgagatgattttgatgatgttcaagaagagaaaatgaattgatgaatctgctttggttgataaaagaagtccgtacctttttgttgattgctgtttggtgttgcaggcattagaag

SEQ ID NO: 4 - DNA, 3073 bp, Poplar sp.
aaattgattagagaaaattatatcccttctcatttcaaaagcacggtgcacggtgaaaagactaaaaatctttaaaagtaaacatttcaatagtagcattaagtgataatttggtattttcaaaatagtttttttcattattatatgtaaaatgagagacaattttgtgtttggatatatataaaaaatcaaaagtacaatgaaaacgaccaaaatgccattggaaattaaaattggcctcaagggattttttcaatttttttccaaaagttttttcaatattaacatgttagatcaggggtaagttgatatttaactaaataaaaaacaaaaagggataagagcatttgatgcatttagaggcacgcaggtgacgcccgctacctttgagcaacgcatgtggcgcctcccgatgttcaaaaataccctttctgttgttgtaagtgcttatgtgttctttttttattggtacaacatgtgtctcaaatggtggcccaagttgtaaccggtaggccttttttcctctcttcttttctctctcctcccccaaaaattagaacttggctctagtgtttgttggtatttcaattctatttcttactcttttaattgttaattttttgtcttgattcttttgtagaagtcttatttgtttttaatttcatcattcaattcaaattgaaaatattatatttttcaatttaatcctcattattttgatttctaattttcttgttggttattttgtaaaagttatcattttttttttaatttcaccatccaatcaaaatattgtttgtattttttatgtcaattttgatctttattcttttgaattttcttggtcattttactaaattagtttttcttttcaattttgattctcattctttttatcactattttttgaatccctttgtataattaattttttttttcaatttcatcattcaatacttgattgattaagaattgaactttatgatttttctaaattgagtgtttcaagtctaataactcggattacggatttgaaaaactaacatgattttttttcaaaaaagagctttataatcctttttattttttatagggttatttcaatctcatgatttgtgccgcgagtttagtgagatatcctggtttggctcgaccttgattacaatagttatatatttgctacactaactcgggttgattaagaataatttatttatgtcttttttatctatttttagcacataaacattaatttttataaaaaaaaaatagcgggtaccgaagctggtatctcagctaaacagtaaaccatattcatgatagagaattcccgttcaaatcacaaccgacccgacgccacttgaccctaccacttcaaaacaaaccaaccatccccaaccgccaaagccgtccaagtcaagatccgacggctgaaattaaacaaaaagaacaaaccgagtcagcaaagccgaaagagtcccaagtccagaacatgaaacggaggtcataagaaaataacagaatcagttacaaattagtatctctattcttacaaaacaaatcaactaatccctctaatttttaattaattaatcttttgtcaatcatgcttaatttaattttaagttattccaaaagaattcttctcatcaatatttatataatacttatttatttatccaaattttatgtttattataacaaaataaataaatagattagaaaacaaatataaaatgaatgaaaagaactaattaacccgtttttaaaattataaggtctattttatctactttgaacaattacagggactagtttttataacactgaaaataagagagacagagggaaaggctgtcagacaggtcaccctatcttttctcgtggtggaaatgattcctctctctaaaaaatttggtcttaatttcatttgcatttcaaaaattccttctctctttctctctcactatatatataaacctcctctcttctcttcagctaacccttacactcctccattttcgtctcaccctctctctcgagcgcaaccaccagctagcaagtcaggcaggccacatctttcgctagacttggcttggtctgtttcgctctctgtctctagatatctcctctgtctccgacttcaaaaggtaagtgactgatctgtatttgtgtcgatttgttttgaattgtgtagatcgggtgaacggctcgttttctgatttgaaattggttgaatcgtggattttttcttcgctttatcggttttgtgttaccgatctaagttaaattttggtgtattgtgttgttgaaggttagatctagaggtttttggtggttttgtttggatcgtttgatttgatggcttgatctggttttgttgtgtatagatctgctgagatgtttttagatctgttgatttgacctttcagattttgattttgattgctatctcgtatgaacttgaagaaacgtagaatttaaatcgtgtgcaaattggacattttatgtggtgattgattgagatttagcttcagctgtggtgtcttggattcattttcaatgacatttgtgttgtttttaagctttaaactcttattttttttcataagatggctggattctgtgagtaaatggtaaacatgctgattggaatttgaatcgtgtgaaattggaaatgatgtgtggtgattgcctgagattcagtttaagctgcagtgtcttgaatttatttttttaatgatatttgggttgttttctaagcttaaaattcttattttttcataagatagctgaattccgagaagagtaaaattgtagtgaatgctgattggaatttgatgagtaaattttattgtttgcatttgtttgaagctttggatggtaaatgatttggaatgattaattggctggtagatttcattttgtgaacaggggagaaattggatatgttgtagttgattattctttatacagatggctctgtaaattatctagaaagatttttctgtatttatggttgcttcttttgctcttttttattttttatttttttgtacagaatttgtagaaa

SEQ ID NO: 5 - DNA, 3818 bp, Poplar sp.
acattttttccctctgattttgatttttcactgtctgcaataatgacatcagagaaaatattaaatgccaaaaagaaataaaagattctcgagtttttgacaaaaaaaaacctgtaagccaagcctacccaagccgaccccaggcttgccatttttcagactcgactcctcgtgtccctgcttaataataaatgttagggcaaaaattacacacacacaatattaagatgatgtagtttttttttttttagtttaacgtgggtgtccgggccagcttacgtgcacctcgactaatcccacgggccctgaagttaacgaccatgtaagccttcagtggccatcatatgagcaaccacagggctcgaacctgaaaccacggagggagcaaacctcttgatcccaagttcttaccactggaccaccacctagatggttagatgatgtagtttttaatcatctagtaggtggtccaatggtaagagtttgagattaagagatttgctctctctgtagttttaagttcgagctctgtggttgctaatatgatgaccactagagacttatttggtcgttaacttcaggacccgtaggattagttgaggggtgcacaaactgacccggacatccacattaataaaaaagaaaaaagaaaaagttgatttagttttacattcaaattattttattttttcaagataaattaacagagaccattaataatcttacaattaagattgatataagaaattgtttaatggtgaagtttatattacctatataactggaatataattttgagtttttctctgaatgcaattactctgctcctccatttcaaagtttctataattatcatattttttctcaagaaggaaagtttctagtctaatcaagtgaaagaataattcaccaaataactgaataagaacatgtatattttataataagatcaagaatatgaaatatgattttctcctataatataaattaaataaatttatagggttttttatattctaaaatataagtttaatgaaaatataattgacagaaaaatagacatgaagcttcttctttttttcgagtttctctcttatattctcttaaaaataattgctttaaagagattataagtaatttcttacagcatttaaagtgaatattatttttttatcatataaatattagaatttttgacaaaatactatcattttatgttttaactaggggtgagcaaaaaaactaaaaaatcgattaaaccgagaaaaccggaaaaaaaataacaaaaaaaaccgaacagtgaaaaaaacccgattaaactgattaaaattttgaaaaaaccaacttgttcggttcggttttataagcatgaaatcaaaaaaaccgaaccaaacccaaaccggaaaaaaactaagccaaactgaaaaatcgagccaaatcaaaaaccgaagccaaaccggtctgaattcctagttttaacattttatgttatgatatattagatcagttatatattttaatatgaaaattcagaattttgtaaaaaaataccatcaactttatttgagttgaaattgactcgattttttttttctaagcttgaagtggctactttattgccgtttattagggctgctaatgatgatttgtactattaagggctgcaaagagttattgaaacgtatatttataataaattatatttagatttagttggtggtggcttgtaaaatatatttatatttaaagaattataagtcataaaaccgttcaacttggcaacatttatttttatttattgaaaagatgtaaaaattggaccgatttaggaaagtgggaagaatacttgatttaataaaaacaaataaaattttataaagaaacaaatcttacatgtctattaatagatgttggttcataaatattttgcatattttttttaataagaggatgccttaaaaccaatttctttaggtaaataatctatatcaagttattgcacactaaaatagaatataaaaccctataaataaatataaatttatttacaaaatgattgataatgtaattggaacaaaaatcatgaaatgcatgtttttatagacaatttcttatgcttttttttttttaactctatagaattataattactaaacttggtaggaggttttgatatttacaggatagttatgttaactcatgtttattatttttatattttttaactattagttttgacttgattaagttgatattaaatttaattatctaaattaatgtcaaaaccattttaatttaaaatccattttaatcataattttttagattagtctattaaatcaagacaagtttaacaactatatataaaaccatgaaaaatcaatgtacaaccaaataggttaaaaggaaaaagaaatgatttacaaaatgtttattatgtttgtgttgtgatactagttgctttttaaaatattttttatttaaaaatatattaaaataataatatttttttattttttaaaatttatttttaatattagtatatccaaattatctaaacatataaaaatttaattttaaaaaaattaaaatttataaaaacacgcagtgcgtaaacaaacacaacttatatctcaaataacggtcccatcatacccgacccgaccattcaaaacaaaccaaccatcccagccgccaaagccgtccaaataaagatccgacggctgaaattataaggaaaaaaaagtcaaaaaccaagtcagcaaaagccgaaagagtccatagccctcaaggccagaacatgtagggaacacaagtgaagtcataaataaaataaaataaaaaaaggctgtcagccagccaggtcaccctatcttttctcgtggtggaaatgattcccctgcctaaaaatttagtcttaatttcatttgcatttcaaaaatcccttcctttctatctgtctctcactatatataaaatcgtcgtctcctttcctcagctaacccttactctctctctctctttctctctcgcaccagcaaccgcaatacaaacaagcaatttaggccaggccacgtctatagctagatttggcttggttcgttctctgattattctctcttatacttctccgattaaggtaagtaaaggatccctttctctatctcttcgtcttggtttgagctttgtagatcgtgttttggttaaacgccgtctttttgttgtttttggtttggaatcggtaagttttaacgtttttttgtttccgatctatgatttttgtgctgtcgaaggttagatctagaggtatttggtggtttgatttggatcgtttgatttgagagcttgatctgattgtgttgaatccagatctgtatgtttttgtgacaagttattagatctgtttgattttgacctacttcgtttggtcattgttagattataatctgccagtgtgaattagaagacattggtaaattggaaatgatgtggtaattgattgagatttaggttgcatttctgtgttttaagcttaaaatagatgattttcgatggatatttggattctattatagtaggaatgataacgaaagataatcatgctgattggattaagctttggatggttaatgatttggaatagttaattggctagtctattttgatttttaaatagtggaggaactagatatgttgtatttgattatatgcttcatagatatgtagatgtatttgtaaattatgtagaatgtatttttctggtgtgaagtttgtttcttttactcatttattgactttttgcacagaacttgtagaaa

SEQ ID NO: 6 - DNA, 3354 bp, Poplar sp.
aacaactggaagtaagacatgacaagagagagtgtccaaaagattcccatcctccaaaattctactgtcaagatgaaactcaaagccttcttcacttccctcattcttcttcttcctcttacctatgaacagcaaagcttgctatatccccgaccactgctgacatgaactcatggagttcttgatttcattaaaggaggcctagcccatggtagaattttcaacaggcctaaacagaggttctgtcatacgagctgcccaatggagagagttcgaaacatgagaagaaagcccaagttaaccaaaaaaaaaaacttgtatttttttaaaaaaacatatttcaaaaaattggattaagaaatttttttatataaaatattgagttgagatgtagaacttgggactgttttggaatttttttaaatataaaaatatattaaaataatatttttatttttttaaatttatttttgacataaacaaattaaaacgattcaaaaatactaaaaaattaatttaaaattaaaaaataaaatttttcaaaagcatggttagaccataaatgtttaattaaatcattcatatttttaatttgatttatctatgaaaatagattatatctcgtaaatttgaagcaaatatatatatagatttatgattgtatttatttcaaatacatgaaccatgttattattttatttgatgataaaatatatattcagaccagtttatgtgtcttacatttagcatttttttctgaacaattttaataaaaaacaaatactctggaaggatcccagcgtgtatataatggagttgagatttaaaattatattaaataagaataaatactaacataaattcataattcttcttattgccaaatgaaccagccagtcacccttggaaaaattctggcaaaagtcataaatcaacgagagttaattgggcattgaaaaataagtaaaggattgatcgaggtatatatatattttttattttttaaaatacaataaaaataactcaattattcttcaagttaaagattttgaaacagataaataagagcatttatattttttttattttttaaagtacaataaaactttacctttgaaaaaaaaacatgtgtataaggggcccttgggtcttttcataataattttttttttttgttattaatggttttataaaaagtaatttaatcttttttataaattaaatattatttaaattaaaaaacgttttggtgcatgtgagcactcgtgcatttttagacgactggtataatgtttttatcgtctaaaaatattcttggaagtaattttattttatttttgattggtgtttcaactttaatttttattttattgattttattttaatttttaatttttaatttttttataaaaaatttattagtttcagttttattatttaatattaattttttatgtatcatttttacaatttaatctttatttttttattttaattttttattattaaattattattattttcaattttatttttcaatcaaaatttatttatattttttattttaattatgataatagctgagacttgattactagaattacatatttatccttataactcaggtttagtcataccgatttcttccgttgtcttacaattttctttagcaacttggaaaaaaatatctctgctgttttgaagttgaaaaaagaagaagaaaatggaaagcatcagtagatattctccaaagtaaagcaaggcgtcaagcaagcaaatcctccacttgcttcactgtcagtccagtggcacaatgcccacctgttccctctcttctctctttttgcttttgcttttagcattatttctctgcactttttcccttgggattgaagaaagaaaaggaaggaaaagaaaggaaagtgacccctctccgtttcactcccatctcattagtccagaaactccaactttttcttaatttctctcacttctaatataaaagcagtaaccacattctctagagaacgcacacgctgtgagtatacaacagaagaaacttgggtttctttctctcttttttcttactccagtttctttcttctttgctctcagttttggctttctatattatcagaatctcaaggtacgttgtttgtttaaagaaagtttgtttcttgaattgtttgtagtgttcctttgctttattcaagaattgggtttgctttagcttttattctttcttggctagtattagtgctttttgttgatgggttttacttggatcatagttttcttcctttagatcttttgtacttggaggtcttggtgttttgtgtgctgattttgttgtatcattgttttatctgtgccttgtagtcttcacagtcaatgatcggagcattttgtgcttaaatttgtcaagaaacttgtttaaatcaagatcaattctggatttatcggaatcaggatcattagatgcatgcttagttgttttatgttcaagacatgcactttggttagtacaaattgtactaaaactcttaactgcgtcttaggaccattggcctttgttttggtgttgcgatgatcagggaatcagattgtttgttgctttcagttgaagtatttaacattttgttcaaagtttgtttgttggtgatgtggaaaggtctgctcatattgttaaagtacagtaatcaagattaatcattggtttatctaaattaagattttatttttttaatgctatagcgctttatgttcaaaactctgctgtagaaattgcactaaaactctattgggaaatatcaatttgttgatgcttattttattggggtcttcaatttggatttcttgtttttgcatgttgatctaagacaaatgtttaccttgattctagatgtgagattttctgaacgcgagtgtttgcacacatgatttgtgttgtgctcgagaaaaatcagtgactgttatgactggtgtgatctttattatgttcattaagctgatcgtggatttgcattaacctttggggtggtgtagggatcattggcctttgttttggcatggccatgaatagagaattaaattgttgtgttgctggtgtgccctttgtcttactcaagtttgctttcagtgaaagtacttagcccttcatttaagtttgtttctccatgatgtaagcaatcattttcttattgttaaagtacaataatcttttgtctttccaaagaccagtcttttctgttgaaggatgaatttatggttatttttccaaatattattttaccttgctatgattctttgccttgactagatggcactacttgaattgcaggatcactataaacc

SEQ ID NO: 7 - DNA, 2000 bp, Poplar sp.
tcacattaacttcttttgtaatttactttaaaaaataaagaagaaaaaatctgttggaaaaactaaagaaaatgaaagaaaacgaaaagcatcactggagatactgtccaaagtaaaggaaggaaggcaagcaagcaagcaagcaaatcctccacttgccacactgtcagtccagtggcacaatcctgttccctctcctctttctctttttgcttttgcttttagcattgtttctcttcagtcacttcttcccgtggcattgaagaaaggaagaaaagaaagtgaccctcccctccccacttcacttcaatctcatgagtccaaaaattccagctttttcttgttttctttcacttcttaaataaaagcaagcacattctctagacaactcattcactgtgagcatacaacagaagaaacttgggtttcttccttttttgctctcagttttggttttctatttcatcagaatctcagggtacgttgtttctttaaggaaagtttgtttcttgaattgtttatagcgtttccttgctttattcaagaattgggtttgcttgcttgcttttagttttgattctttcttgccagtatcagtgctttttacttgtggattttagtgttttgtgctctgaatttcttttattatttgatttctgttgctttatagtctttattatcaatgattggatctattacttggatcattttgtgcttaaatttataatatcaattgttgattattggaaacaggaacattcgatgtatgctttgtgtgtgtttcatgttcaagacttgtgctttgggcggtagaaacagtactaggactcttaactgcaactgtcagttagcgtagtgcttatttgccgggtttttggacatggacttcttgttttctgctaggacatatgtttacctgggctgtggatttgggatttgttgatcatgagtatttgcatttgtggtttgcgctgcatgctataaaaatgagtgattgatatgactggcatgttctattttgtgctcatttagctgataggcgatttcgttaaccattaatatggtgtagcaatcgttggcctttctctcaggattgcaatgaacagggaatcaaattgtcgtcagttgaagtatttgacatttttttcaaagcttgtttcttgataatgtggacaagtctgctcttattgttgaagtacaataatcaatgaagatattttttacgttcaagacatgtaatttgctatagaaattgcactaaaactttattaggggtcttgaatttggacttcttgtttttgtatatggattctaagacaaacgtttaccttgattctggatacgagattttctgaacgcaagcatttgcacacttgatttgtgttgtgtgcaagaaaattgggtgattggtataactgatgtgatctttagggggtgtttggtaggggatttatggtggttaaattttacccttgtcaccaaatattttttttatttttccactaacttttaacccttcaatttattagaacaccaaacattcttacaaaccaattttgccagccttaaaaattgctattgtaataattactccagtaataattcatccttctttttcatagcctagcaccaaacaccacctattatgcccataagctaacattggattgtgttaacatttgaggtggtgtagggagcactagcctttgttttggtattgccacaaataaagaattaaattgttgtattgctggcttacactttgtcttgcttaagtttactttcaacgaaagtacataacacttcgttcaagtttgtttctccaagatgtaaacagttcttttctcattgttgaagtacaataatcttgtctttccaaataccaatcttttctgttgcatggtgaatttatgattatttttccaaatgctattgtaccttgctatggttctctgccttgactagatggtactactcgacttgcaggatcagtataaacc

SEQ ID NO: 8 - DNA, 2000 bp, Poplar sp.
tttgttttgttctttaggtgcaccttttcctgttttgttagcattaattgaaataaaaatgactttcttcttccagtgggcttgtaaagtatattctactgtgatcattatgaatgttttctgcaaaagaactgtgacgagcaatgacatagctttttagttgagtcctgtaatatttctacatatgagatgagatttttttcttcctggatcaaattaagaataagctagtgagaatcctggccgaaggtagaagaaatagcactgctctctttcatttcttttccattttagaagccctcacttcatctcccttccatcagaacagtttttgatcgaggaagatactccagctatgtatatcaaaatggatatatatataatagtttatttggttaccttaattttcctgacagatttccgcgatacatgggcattcctagatgatcgagtgaaagatgcttttgatctcaagaaaaccattcaggaggtagtctcttttagttttctatggtgttctatatcaacttattttgggaattttggcctttcttgggagggtaaggtaatgtggttactttactgcaggcaatgtatatggcagaagctgttggtgctggaatggggaactctttccaaggatttgtaaggagagtttttcagaggtgaactatgtatcaatgtcacacattttcactttcttaccctttaaaatgttatcgcctatgatgagagattcaaactaggagaagatgtcttcatgttgaagtacctttagtggttttgcaatttttactccttttaatatctgaggttgctgtccgaggtcaaccatgtagcgaatttccagccctgtaggaattgattatttatcctttcaacaataagaagttaaagatcaaaatgatcttacaggaaataaattatctccattttcaaaagcaactacctcgcagcaatgatttttgttgattgataatgagatgcatttatatttacattgcaccttggaaattcacttatcctgatgatagtttgttcaatcagattagctgactgttttgaatgtgattgaggtcagacagttacgggggggaagaagaagcagctcccttctgcttcctgctttttcccaaagtcaaatctgtgtcttctcctcaccatttggtctcagtactctacggatccaatttctcacattttccttgccgcatttatcacttgaacaccgtatgctcttgaagatacaagccaaactcgagccacaacaatttagcaacaatttagaaatcagctcacattattcacaagtttcagcccttcatcatggtggaacctctgtttatagaaccctttactatcctgggaatgcaaagtctttcaaaatctccagtactctcagcaattaacgaaactctgctggagaaaccaagaagtcaacagacacagtagtaaactataagctcgctgttcaagcaactattattagtaaatcaagcagaaataaaacccagttcagacttcgatttctcttacttttcaggagatcgagagttcttgtttattttctgttaggtctggtcatgcatgtggcgagaaggtgtacggtgatacggtcaaggcttaatacttacaactgaatattaaacattttagcaagttaattcttggaacgcccgttcctgacatattctgtactgtgtcaacaatctatccatggcccaaaaaacaacatgatgtgagcataaatcaagcaaaatcacctccgatgtgagacgaagggtacgtaaaaggtgcctttcaacctagtcttgtaaatatgctgacattcactggaagcaaccggaagtgggtgattctaagattcatcctaaagttagagtttaccgccgttctcttccaccgcttcctcttcttaaatatcacacatgtccgtgtactctctaccttctacagatattctctgtcaatcatctagatcgagttttcatagcacaggc

SEQ ID NO: 9 - DNA, 3000 bp, Poplar sp.
aaccaaaattgacattttattaaaaaaaaagatgctaaatagcatgccacatcgtgagagtatgtttttcttgtttgcatcaatcgcttagcattttaatccagtgtttgatcatcgttaacaactcttttaacattttttaggtgtatgatgaccgattagttttattgaacacattgatcgaactttcaatacgcacttcaatttttttatcatcaactcgaaatttaacatctctaacatgtacttttttatgcttgagttgacttttttctccaaccttcagcatagcgtggggccagtactagttatttaactaatttgtatgatttttttttatatttcctaatagattgttttgaacgaaggaatacctctttgacatataacaatctactagatcattggtttgcgctatgctatgggtcagattaaattttttaacataaaaaatgttcatgcattgctaatgtttttgctaataaaaaaaaagttaatcatgaactcaaaatattatgcatgttgtatgatatcttttgtaaatattgatacggtgatatattagattgacctagattaacccgtcaaatttgtcattcaggttataagatcatgataaccttatagaaaacaaaaaaaaaagtcatgatggtcaatttctaattcactcaatgttgaatgatgaaattaaaaagaataaataaaaaatgaacaaaaaaactactcaggtcaacttggcaaaccaacaacccgagtcatgagattgagataaccccgtaacatacaaattaaaaaaatattatgaagctcaatctccaaccaatccaaatttgaaggatgaaatcgaaaaaaaaatcaattaaaaaaaagataggttaaaatcaagagaaaaaaactgtatccatgagaccgggataactccatatataataaattgaaaaacaaatacgaagcttaattctcaaacaacctaacattgaagatattgaatgatgaaattaaaaaaaataaaaaagattaagttgtcggaggatgaaattgtaaaaaaatcaatctaaaaagaacaaaaaaatgaatagagttaacacgggacaacttgtcaaactcgcgacttgagtcataagatcagaataaccccataaaaaataaaaaaataaaattatgaagcctaatttcaaccaacccgatgttgaaggaagaaataaaaaaattaagtagaaaaaaacggtaaaaaaatacccgagtgaatctgggttaacttgttaaacctgcaacctatatcatgaaatcgagataaattcataaaaataaaaaaacaaaattaaaaagcccacttctaacagatctaatgttgaaagttaaaataatataaaaaaaactaaatccatgaaatcagtatataacccaacaaaaaataaaaaaaattatgaatcacaattcccaaaataacctaatattaaatgatgaaattgaaaaaaacctaaataaaaaaagtctaggttgttgaagggtgaaattaacaaaaaaaaatattattctagtgaatagtgttttataagtgtgactatagtgatttaaccacatcttttaatgtatatttgatattctggtagttttttgcggttacgatttgaaaatgtatgtttaagaaaagctagaaattgtagcttttcagcaaccaagattttaataaagaattttcaagaaaacacatgcaagctatgaagtatgttgattaccaaacactttcaaaactgtggttgaggcaaaacatagtttcaggcttttagccacaattcatcatactaccaaacatatacttaatattttgttaattgaatctctcatatatagacaacatttaatattttgcaaatatatcaaaaatttcaatcacttaggatgtttctttcaaggctctaatattttttttataagggcgactagctttgtcaattgctcgatagtttttccatcacatctgatgatcgaaaaattagagttaaattgatggatttacaaaatcatttttcaacttttttttcattagaaaacgcctcaaaaaccttattgagacctcaataaatccattttcaatctcaaaacactctttattcactccaaaaaaatgaagattaaacaaataaaaaaccttaactgacaccgatctactttctttggcatgttcataggaaaacattgtcttcattgaactcctcttaagaagacaaacctattgactcaaaaatcaacctttttggtagccaaaatattacaattcgagcactttctctaccctctaacatttttcaatgactttctttctcttttcctaaccaaaatatgaccatcacaacactttgtctctcctttatgtttttcaatgactttctctctttctttttttaatatctaaggattaaaatgtgaatacgataaagtttgatatcaaaacatgaatggttaaaataactagactaaatgatagaaaaataaaactacagggatcaaacttattgtggaatatcactcaaaactcaatacatgcgagaacatgtaaattatttgtttttttttaaaaaaacatgctaatgtaacttagaagagtaaaattgtaaataataaaacttcaatgataattatttattgcgatcaatatttattttaaatctaaattaaaaaaattaaatatacataaattaagttgagaaaaatcgtgtttggtattgcgatcaaaatattatatattaaaaattaattttatttttttgtttaaaattattatttttaatatttttatattattttgatacatttgatattaaaaaaaataaaaaaagtattattttaatatttttaaataaaatattttaaaaattaaccacaaaatataaagaattacgggacagcccaagtcatcccaacaacgttccttagctgactgcactttcaatttattccaaagtttgaagaaaatcatcatcgcagagctgcctcatc

SEQ ID NO: 10 - DNA, 2420 bp, Poplar sp.
aaaaaatgtatctctaacccctctatcgataaaatcgacaaggtttagaggcactaatgcctccctaaactctcaggtaaaggattcacaatttctattctctagactttaattcttttaaatcccagagtatttattatacaaaaaataagaaaaaaacactcttgttcttgtaatttaaagtttattatctcgtttattgcaatcttttacttaaaagttaccgattttatcatccaagaatctttaaaccccatcaatttctattaccaatcataaatttctatttttttttataggtgttagatcttctattaccaatcataaatttcttaagctctggataatgtgatattgacatgaaaacataattatgtattatctaaacaccaaaacattttatccctaggtatattaaattttagaacaccatgaattacaaaacagaattgtagaaactaattaaatgtttttaatcattcttagcaactattttaagacattcgttagtggcttatgatggttaaagctcgccttttacattgaacacaactccttccaaaaaaaagtttttttttaccataactagcacaaaaaaagaagagggatttgcccttttttttaaaaaaaaaaaaaaaaaaaaaaaagaagaagaagaagaagaaaactaaggaaaatcagtagcctttttatcttctcctgttcaaattaaaaaggaaaatagaaccacaattagcggtcgattaatccaaaagtgatcagccacaaataatccgtcccacgttgtgtttgttatgcatggcacgtcatacgcttcatttatcatgatacaatgtcaaccgtcagatccttgactgattcctctagtcaatgacgactccgttgcattgaaggcgacaatcgagggtgtaacagacaggtgatgatggccataacaccacctgaaaacacagaccgacatgatctccagacagttggaaacggaatgctgagttggcaattaatgttttttattttttagggtttttttagtcctttaacagagactaacttgcttcgtgatacagaaatgtttgagagtaaaataataattatttttaaaaaaatattatttttagaaatatatttaaataatattttttatttttaaaattaacatattaaaataataaaaatattaataataatttttaaaaattaatatttttaaaaataccgttcaaaatataattttaaaaactcctgtgttccaattgataggaaattttcaagtatcataaactcaatttactacttataataaaataaaaaaaggacaaatgttaataaagataatctaatggtttgaagatgagattaaaacatagaatttcaacttaaaattttaaattttaataaaaaaattatattattaatttttatacgatctgtatgatggatttggagtagtagaatagttgagtttttgttaaaataagatattttatgattttctagaatactttttatgaaatcatgatatgtaataaatatttaaaaattatatttcttaaaatatgtaagttaaataaataatattcacatatgattgagttttaggctttgtaacataatatttttattttaaaaaaaaacctcaatatcaacgaactacccgtgaaaagagaagaaaattagacaccaaaatgagataagcaatgaaacggtcaaattgagatttgagagagtggtcaaaaaaatttaacaaaaacccacaattaaaggcttgcaatacccgaaatgcccttgttttacatccgaggttagaggaggcattacaacaatcccaagagcaaatccgtccatacgaacaaaacaactgaaagtgagccagctgtttacacaatgagcgtgacgcgtcatggggtccgtagatcagatactgagaaccaacggccaagatcatttcaaagagaatttgaggttcatttaagctgaatttcatttgaggctgaaatttcatttcacatcttccccttttttaaaactagagggcgggtaccttgaacagacgcccacacagagatcgaatccagatttctaaacggtatttcatttgagtttcattattttctttgttaatctggggttagcttagaatccagcattatcgattcaagcaattaaaagactttatctttaaatgtgggctaattcagttttgtaattcagcattgctaaggtcttgatctttgatgtgattttatcagaatgaatattcagattttgattgatgcttgtaaaaaggaaatgggatattcttaattcgctttatttttggatttgtttttgtcaaaatagtacattagattgttgtgattccctatttttatagcattttaatgtaaagttggcattttttatgtggcaggtgagaggaa

SEQ ID NO: 11 - DNA, 3276 bp, Poplar sp.
tccattacttgttgcacatagattatgcttttgtttattttgacagtgatgaattgtggtgactaatttcattttttcccctcatgcttctatttttcttttgggtgcgtaggattgttgagagtgttggtgaaggtgtgacagacctcgagcctggtgaccatgtgcttcctgtattcacaggagagtgtaaggaatgccgacattgcaaatcagaagagagtaatatgtgtgatcttcttcggattaacactgatagaggtgtgatgctgagtgatggcaagtctagattttcaattagagggcagcccatctaccattttgttggtacatcaaccttcagtgagtacactgtgattcatgttggctgtctggccaagatcaatcctgctgctccactggacaaagtttgtctcctcagctgtggaatctctacaggttgggaaaacaccaattcaattattcttaaacgaacaaagattttctcaccttcttttgatgaggatttggtttcgtgttgtaggtcttggagccaccttgaatgttgcgaagccaaagccaggctcctccgtggccatttttggactgggagctgtaggccttgcagtaagtttcttttccaatacacgaaacagatgatttttctatccatttatgagttctgatgctagcctgctacttatgttaaatttgtttttgttgtttgacatgattaggctgctgaaggtgctcggatttccggtgcttcaaggattattggtgttgatttgcattccagtagattcgatgaaggtaaaacaatcatttagttttatcatatcactagttttctttcgctttttcagctattgctccattggtgtctttagcttgtcggctgcattagttaattattatgtaagagaggatgttgcagagaggattttagcattgtcaacttactaggatgaaactgatcttcatattatcgagtagcttcgcagttgctacttggtgattgtgctaaaatattacacaagacgtcatgttttttatgttcatatacaactgatttctgatgttcatctgtgttttttatttcaacagccaagaaatttggcgtgacggagtttgtgaacccaaatgatcatgacaagcctgttcatgaggtttgtaagaagatgaatcatgtttggagggatgattcatatgaaccttttgcatcagttctaattttgattttccgtctgtaggtgatagcggagatgactgatggaggagtggatagaagtgttgagtgtacaggaagtatcagtgccatgatttctgcattcgaatgcgtccatgatgtaattttctttaaactgttttagtgattatggatcactaaaaaaaaagcacttttaaaacacccaaatctgttaacattatggatctctttgcagggttggggtgttgctgtgctagtcggcgtgccaagcaaagacgattctttcaaaaccaatccaatgaatttcttgagtgagaggactctcaagggtactttctttggaaattacaagccgcgctctgaccttccttcagttgtagagaagtacatgaacaaggtaacttcaatccccattaatcaatctctagcccgtagaattatggtttccattagtgctgatcggaagcaatctgtatatgaagtttctcaaaatatctacttgaattatcattaacagtgacattgttttattttaagaacattatcataggcaacaaagcagccattcctcctcctttggttttgaacattctatcatcatgcaaaaaccctcttatcctaactagttgttatatgtgcaggagcttgagctagagaaatttatatcccatgaagtccctttttctgaaatcaacaaggctttcgagtacatgctcgctaaagctagcctcaggtgtattatccggatgggtgcataaaagaagaatcatctttgttgattttcaggtgtattgcctgagctagcctcaggcgtattatgttccgatagtgatcagttagatgaaacaataaaatccatgctttagattgataattaagtaagctgttaccactacacttcctcatgagaataaataagattttgacgtgttttttttactaaaggttatcagcacgttcatctatttcacaagaagaaaacaaacacaggaacaacacgtttgaattcctctcattaggcaaatcagctggagccaacactttattttcaaagaatgatcaggcggagccatattggccataagtggtcaagttgctagaacatgtacttcttgaaaaactcataaaagtgtctgtcaacttcttcttgtgttaaaggcctcgtgaaaatactattttactcttaaaggccagttctttgtgatttgttttgaacggtaaaagcataattaggatgtgttaaataataaatcctgttcctaaaggatgatccatttactccctaaattatacaaaattcccgaggtttttattcttcttcagtgaaaaagaaaaaactgtaagaatgataaagggaatcgaaattatgtaatgaatgatccattagtacattgtaatagacttttttctaaggcaacttattctatttaaatcaacaaaatccatgtactaataaattatactatcaagagttattcaaactggagaggtttgggattattattattattatgaacaaattgattattagtgacagccattgctaatcagcgtgagggttttgggataccactgtaatgaaaggttggaacaagtctttaacagcacaaaagatagactataattagcaaaaaccacaaaggctaattagagattaatccccaatcgtgatagagatttcagattgatttatccacaaagagaaaaagaaaagtaagctgattgggtgataaaattgcaataattgctagttttgagactgcattaacacgaacatcttagttggaggactgatttgtattatctaaaaaaagaaacataaaaccagaaacagtccaatcctgaaaccaaggagccgcaggttctaaatacagaggacagacaaaacagcagagatcgtcaatggttttctctttaaaaatcttcaaatcgatagtcaacgttaaacatgagagacatacatccttctgctactataaatacccacaaggaacaacctctttcttcacaactcaagaaacagagcaaactactcaaagaagcctcaaagaaaaagctgttaaagttcgtttaagacaagaaagaat

SEQ ID NO: 12 - DNA, 3140 bp, Poplar sp.
aaaaaagctcatgtgacggttgtgtatatgatccttagacttgagatcactaagtatcttatatagagaatgttatgctttaatcatgttacatgttatcttgatcgaggtaacgaaatgacagacattgggtataacatgaactatataaaggtacttgagtgatcaagagaacattcatcaccctaggtgaattagggaaagtatttcatttgttctcaaatagtattgattgagaaatcattggtcaatgtggaataagatttaaaaagagtttcaaatcttataaaaacgatcaatgactattatgtaaagagcaaacatgatttaacattgcagatatactatatgctttaatgtcaaattagaacattatttatgaaaggatattaattacactaagaaactagtcactgaaaagttaggtcaaaccactaatgatttttttaatattcaatggatcatgacatgttgctagatgatgcacctgatcttcaaatataaattaatcaattttttaattgataataaattaaattgtttaatttatttaattctatataattagaattataatttatatttgggccaacatattaggaacctaatgggttacacgcattaagaaccaacagtcagaaattaaactgagattatttaattaaatatgacttaattaaaatatattttagaaattaagaattagaatataattaatacaagtattatatttctaaatctagaaaaatcaaataagaacttgattgagttaattttcaaaattatcctgaattaatatatagatattattcaggggcaaattgacattttgttaatttatatggtttttcaaatttttctataaatagtaagctatgtctcttattttatagatgttttatgttagacagaaaaactacgtaagcacaaaattagaactagcactcaggcataacaatccctttctcataaataggaatttaagagatttctcattgatggttcatgtggattgttgttgaaggccggacaattggataacttgtgatttacgacaacccaacttttaaagaattattcaaagctgaagaagatcaaatcttcaggcaataaattcataaacaactctagatctatctaacgagatcctagggactctcaaataatattgtttcctagtttctgctatatgtatgatatttagaaaacccaacacccgctgcaagattagtatggctatcgacctcttcgacaaatctgcctacacaaaacaaacacaaaattctctctctcctaatctaagaaaacaacaactagttatcaagcaaaccaagaaagtgcttggctggaacatgtgtggtgtgattttctctgttaacattttgagcatgactagaatttctagggctgaaggaagttcttggttgttgtaaatattgttggcatacatataaatagtgtaataagttgaatattcatgatgtaacccacaaaggcactattattttgaatggggtaaactttgttctgtcactgagtgaggcaaaatggttttaattttacatactaatcttcaaaaaattcatattagaaattatcttacaagatggattgatgattgcttattttacttgttagattattatgtgattgagtatattaaagagaatttagttatgtttttgttatttttacatttcagaactctttagccattatttcaaatataatgaagttttgttaataaataaatattatttgttgactctttttgtgacaccaactctaaagaataaaatgttttttgtcttcaaaattcaagttataaattgtaatattcaaaaacctagttgcaaagttaaaaaaataatcaaaccataggattcttagagtaatttacccaaatttaaaatggaaacaaattaaagaatttaattgggttttgaatgggttatctctggactgatcgagttgcaagtcaatctaaattttttaccagatctcacaaatcaattttattcttgttattgttgaagctcgacttaacttaaacttcaagtcatctaagttatgaatgatccagtcagatcagattagacactttttgaagaattgtaattgctttcgattacgtgtaaataagtcttatcatatattaattgattatttgtgttttgagtgaggatttataatctttattttttatataaaaaaatgaaaataaaacgtttgcaaaataaacaaaaaaaaaaattctcagggcattttaaatgagacgttttaaattttttccagagtaattgcagaaaatgtctgtgttttctctataaaagaaattcttttgacagcctgcacttcattaaaacaataataaaggtaagtgtttgtccggctgtattacaagattctaaaaggtcaacgacttgccgctgcagtgtaaaggaaacaaacagcaaaaccacaactggaaatacaaaatctagaaacgctaattgcaaaacagtccttcaattatgatagatatttcaattaaatgtcaaactatatactcattttcaattttaccatcaaacgatcaatcgcttaaaaataatttccataccatgtaatttttcttttgagtgtcaagaactacttctatcgtaatattaattaaaaaaacactacacgataatttttttatcacaaaataaaataaaacttctagttagtttaagaaattgtgaactctgccaaatgtttgtcaaaactacaaaaccagtgacatttgaaagataaatttgcaaaattgtttcttcagatagtattaacaaagtatagcatagtttgaggacaggtttgtagttagccaaaaccagacacaaattaaatagagaaaccagaaagccagaaacagggggagccgttgttgccaacaagagagagaaacagaggacaaatgaaacagcaggatcgtaaatggttttcttttaagaaatattcaaatttatggtcaacataatccaaaaaacaggagagacatgcgttcttctgcaactataaatacctagaaagacaacctgtctcgtcacaactcaagaaacagagcaaagtaatcaaagaagcgttaaagaagggtctaaagttcgtttaaaacaaag

SEQ ID NO: 13 - DNA, 3140 bp, Poplar sp.; identical to SEQ ID NO: 12

SEQ ID NO: 14 - DNA, 3000 bp, Poplar sp.
aaatgactaaagtaaacattttgcgtcaactttaaaattgtcacttgttttctctaatttttttattttaatcctttaccttttaatttgttcctttccaaaaagttcaatgaatagattgaaggaaaaagaaaattgtggattcctctagacaacatctatgctttttaggtttttctttttttgtaatttgtatttcaccaagagattttatatctgaatttcattttttttattgataatatttaagtagaattaacttatttatataaaaaaataacattaatgtttaataattattaaataaatcagtttatcacataaagatatggatcaacagatcatcctatacatcaatcttttcacaaaagtctcttgttcatctcttccctgtttcttcccctgcccaaggctatgacgagctactacaagaaatattttctgaaaaaaccaaaaacaaaaaagagacaagacattattgttagttgacctgcaacaaattagttacacaacgtattattacaatataatgacgagctactacaagaaatatttacaactagctacattaccagctcacaggtaggataaaaaataatctaaaaataataatattcaatcaatgtaagcacatttttttttaaaatatcaaataaaaaataataatatcaaatgatgaaaacaaaagaaataagcaaaaaaaaaattataaaataatatcaacccgtgttaacttataaaactcgttcctgaaccttttgattgaaaacactaaacatgaaaaaaaaatacgaagcccaattcctaacaggttaaatattaaaggctaaaataaaaaaataactatacataaggatatgaaagaaaaaataataaataaaagacaaaaaaggtgtaaatctacttaggttaattcatcaaattcaagggttaaatcatgagatcaggatattctataaaaagaaagacggagaaaaacaagaagcttattctacaaacaaaaaaaaattgtctagtaatgagattaaaaaaaaaaaaaagcgatgtgaatctatgaccgggccatttgactacaaacaccaaaccttgaaaaaccataaaacccaaatttcaataaatcaaatgttaaatgatgaaatcgaaaaaacaaaattaatcacaaaaaaaaaggttcaaaagaaaaaataacatctaaaataatgaggaccaaattaaaaaaaacaaattagagaatggataatgttagattgaagggctaaattgaaaagaaaaattaatttcataaaataattaaagaataagccaccaaaaagaatgaaaaccaaatgtataaaaataaatttttttgattaaaagatgagattgaaaacaattgaaagttttaaaaaaataaggaacaaatgagaaaacaaagtcaggaccaaatttgaaaaatctaaaaacaaaaagcttagattgaatgatataattgaaaataacaaaaaaaaaaacttataaaagggccaaagataaatattaaataattaaaagaatgaggactgatacttaaatatacccaaccaacaagattgctctaaaattttaaatgcttggtacgaatctcaagagaaaagagaaaagaaaagaaaaaaaaaacaccggtgataatccgtccatcaaaaccaagtacccaccatctgctaaggaagagtatgccgagagatattaaatgacatagtaaaagtaaatttttaccttctgtatgacgacgtacacactgctgaagtgatgagacttctcttatgcacttaatagggtttttttaaaatattttttaattattatgaaagactaattcacccctcaaaacaactttattataaaaaacaaattttaaatataaaaatatccccaaagaaagctttattaaattttaaaattattttaggaaattcacaatgctagaaaatatgaaatctcaaaaaaaaaaaaaaccttggagacttattatctatttttttgcatttaatagtattgaaggggttttactattaaaaaaaatcattgtatccctaatcaaaacaatatagacaaatggatcacgtggagaataccattttatccctaagcttagttttctaggttatttggtgaatgaaaaaacaatataggttggcctgagtggaaaatgttctggttgcttaagcaagtgaatacaacaaaatttcttgggagaagatcccaaatccaaggggaagatgagttcttaaatgcaacttcactctaaactaatccttctccttaaacagattgattattactggctgctagagtcggcattgtatatatatatatgtcaaccagccgttaacaaaccgcaagataaactaagaataaatcacaaaaccacaactggaaatataaaaccaccaagtctaaatagaaatcaatccccaatcatgatggcggtttcaaattgagtttcaaactagggaaatcttactatctaacttaaaatcaagcccgcaaagtttaaggttgcatattactagggaaagccaagttttctcacgcctagcatgtaaattatattcttagtatcaaaaactatttgatatcatggaaaaaataaaactataatccattcaaatagagaattttcagtaaaaaataaatgtagaaggtaggaaaaattgaaatggatggtcacactatatgtatcaaaatatgttaaatagaggacttaattgtagttagctcaaaccagaaaaaacagaaacagggaatcaagaaaccaaggagccgcaggtccaatacagaggacacaacaaaacagcagagatcgttgatggtttttctctttaaaatactttaaatcaatggctaaccataagcatgacagacacacatgcttctgctactataagaacccacaaagacaaacctttctcttcacaacacaagaaacataaagtgcgttcaagtcaagaaacataaagttcgttcaagacaagaaagaat

SEQ ID NO: 15 - DNA, 3145 bp, Poplar sp.
agggaaaaacttacgtaaatcaatttccggggccctcttgtggacttcttgttcgatccaacggaaaaatccacaggaaaaatcgatcatccaatacttttataacgagcactccttgacgtctttcgccggtaagaaaaaactactccgccgatatgggttgttcggataaacgtggattccatgagctggaaacgtaagaattttctctagggggtggtaactacaagtgagtccctgtttgcagtgagggtttcattcaagttcctaaccaacaaattaagacactttattttattcaattgcatccctgttaacatcaattagtcacaagattttattttccctgttaacatcaattaatcccccgttagcatttaattttcatagcagggaataatattgatatcatattttagtgaatttttgtaactacttgtgtatatgatgggcagtaacttaattttgaagtttataaacttaatgaaaagtatcattacaattggaggacttaattttctattaattaattaattcaacttttagggattttaaaataggaaaagggaaagagagcgggaagagaacgtgtattgacattcattagttatgggcccacgggttgctctcttttttcttttctttttttcattaaaaaaagaaaataaatttttttatggtcaatgagttgaaaataaaatctcctaatatgactttttatttatatttaatcaagtcaaataaaatattatgagatgaatatcttatatctatatttgattaattaatttaatttaactaaaaataaaacatttttaataaaaaataaaataaaaattcaaaatattcttggttattttttaaattagtaaacaatcatataaaaatcaaataaaaaaattaacgaagaccaatgtctaattaaataaacaataaatgatgaaactaaaaaaaaatataagcttagaaaaaaaaaacaaaccctaagaaaaatctaaacttagattaatcacccaaactcaaaacccatgaaattttagactcatactcaatcaaaaaacttgactcttaatcaatttaacattgaatgatgaaactgaaaaaaaatatcatttttaaaaaatcaacatagtggaaaaaataacaataagaacaataaggatcaaatctgatatgaaaataaaccgaagaaggatgaaagcgtcaaaaaattcaactgtaaaaattaattcaaataaaacaaataacaatcaaaagactgagaatcaaatttgacagacaataaaattgaaaaaaaatgaaattgaaaaaaaatcttataaactatttaaaataaaacaaatagtaacaaaagaacatgtatcaaatatgaataaaaaacaaattgaaggggtactttgagattttacaagggtgagtgtaagaattgaggatgagaaagagaaaaagaaggccaccaataccaaacaagaagtccattgatcacatgcatcatctaggagttgaagggccagtagaaagattcaaatgctgcctttgaagttgacattttgccgttggccgacatcgtacgttacggtcgaatagcacaatcacaatcatgcgttgacgatatccattttaatttttttataatatttatatttataaaattacattaacatgacaatcacaaaaaaaaaaaaccagaataaaaacacaaaaaaatcctttgatgtaagaaaattcaactttaatgttatataaatgactatacttgaaaaataaaaacacaaaagcacttcgaataccaatcttaaaatagaaattgattcgaaggtgatgtagatattttactatgctataaatgtaaaaatacggaactattcccccgtaacactgtaacgacaaatgaattattgtgaataaatcatttcacctccctcaactaattattcggtttgttttgagagcgacaagaagattttttttactgtagattactatagctgctgtcccacgacttttatattttcttataattataatatggatagacctcagacaaggaaaatcaaaccagcatatggttgtgttttactaaagtacccaccgcacctctaacaagacagatgcattaatgacaaaacaaaacttaagatttggataaaatatatataaaaaacgtttctaaaattaattaaaaaaaacgatcctgaaaacaaatagaagagaaaattaattacgcgaaaattgtaccttgacaagagaacgaaaaatcaaatccacaagccataaaccaaaaaattaaaatcaaacatattaattaatttttatgatatagtcgcgccgaggctcccgagtttctgcgttattagtgtcttgttctacgagatgcttttggataggattttgcttaaacagtgaatataaaatgatgatttttttttaatggttaatatacaattctgtttttcagtattttttattttaaaaaacattaaattaatcttttttatataaagatattaaaaataaaaataaaattattttaatatattaaaaatatttttttaaaataatataaaaatatatttttaaaacataaaagtaaatgagctatcatatcattatcagacgccgatctagacttctagtctactagtctactgctctacaatgacagatcctagagggggaatgtacacacacgaaaatcccagcagcaggggcgccgaatggtgtcctggctcagtggcctgtaattttttaatcatcatccttcattattaattcttgaatccgtttgtttacgctgcggctgcgttttagataaataatttcgaaatccctgttgatgatagctgtgctgctcgagtgctccactgtctttccaaaagcaaattcaccgtcgacttgaaggccacgtgtgaccataaataagattaaaagataagacacagaagaaaatctcccaagtaactacgaaacgttaggcgccaccagtaatcaaaaccacttgacaaattccatcagaccactgtactgcttgcagagttgtagtcgtcattaagttcactatctctataaatcaaaccacgagacgagatagttgcagcgatcaaaacacataatccatcatctcagaaatacaaaagaagaagcc

SEQ ID NO: 16 - DNA, 3000 bp, Poplar sp.
atgaaagatatattttttcatttaatttactaaattattttgtataatttcttaaattatttactaaataaggcgggatctaaaaaaatgaggagaaattatatatttagagtttccattcccattgaaccatagttaaatcatttttttttcttttatatatgtctaatggaaatcagcttctatacattaagatttaaattcatctccattctaatcaaagatatattatctaggttaaaataagagaattcatgataattttatttcttaaatcgtgatttgagatttcaattcttattagttaaagagtattattggtaatgtttggttgctttctcggaataaaaatgaatgaagatagtgaaaatagaggaaatatattttcatgtaattcatgttttgagatttcaaaaattaacttcaaaattattctagaaacgtattttttatatatttgtgtcttcatctttttttaattagacacattttcttattatagttttaaaatataactcggggttgaccctagataaagagtcatggcttggaggatcgtttctaaaaaaaattaaaaaaataataatcaaaatgatgtcgtttaaaccataattgttttttttttaaaatagtcagcagattgatgaccaagttttgatcaagttaggcctaggtcaactgcagttttttactagaatagctgaggttttttttttcttcaattcaaactagtttagatcttgaatcaaaacaggttttggattaacctactactagtacgagttttaaaacactagtttttatttcttctattactttgttcatgaacattaactaaataacacaacccctaaggttatggtgaaatctcttaaccgtttgggaacgcggttgaaaccgcgttccctaaatttttttttatgttagattattttgatgtgttgatcttaaaaataatttttaaaaaataaaaaatatgattttgatgcatttcaaagcgaaaaatactttaaaccgcaaccgctaccacaatctcaaacaagccatagcaaaaaggcaaaaaccatgtcttggttttttaattttaaagttggagtggatttggggcgagacacagtataattttgggtcgattggttttgtattctcttgggtgggtccatttactatgctaacatcatcacagaaggccttattaataggttgtatattctatgtgtagcctccactccactcccactcacagcacacgacccagaatttgggcccgctgagtttttccttcaagaaaacaaaagtgggaccctaagagtagcttttgagaaaaaatgttcgattagttgaataatttttgtttttttatattgaaatttatatataattactttttagattcttattttatataagttaaagatctgtttttcatttattttatataaaaaaacccattttacaacacttttaattaaacatgtcttttatttatttttaaatccataactaaaagtattttatttaaatctattttttaaaattataatcataaaaattataataatatcaaatacatattacacgcatttcaagcttgttcatcaatatcccatttgagactccatgcaaatggtatttatagttgttagacttgatataaaaagaaaaaaaacttaaattattacattatgagatcaattattggataaaccaaaatcaattatttaattattttttatattaaattaattatttttaacttgagtgaaaaatcaattaagtttggctagatcaacttttatcaaattaatatcttgtttgatttaattaaaaatctaactcgagttaaactttaattcttgtatttttaaaagtggccatatcatatctaacaattataatacttaccttcgactatgtggaaaatatttcttagaaaactaatccttaaatgaaattcaacatttaatggggtccttttttttttagtaagattaggtttccatcttactagattaaataaatacacataagagacgtgtggtttgttccaattggacgaagatctaatttgacctaatctataaagaattcattcggacatatatattcatctttctcgataatcttttgctttagttgataaaaaaaaaaaaccctttaatttatgtaacatttatttaattagacagagccacatcctttaattatgacaataaccatcttctttggatgccgctttatgagttacgccacctttttatctgcagtgaagcctcgaatctctttaaaatggaaaaccagggaacaatcatgcgtgttccatgggagccaagacatgcaatggagaccctggatttgcttgcttccatctattcatcacaccctacatctcttttccctttacagcaaacgaaactagcggtgatcactgactggtaatcacaagcccacataagctctgtttttattaagagaatcaatctcgtgcccacaggcctcatccatcctttgctaaaatatttgtctaaaatttatttttgatatgtgggttgagcaatttaggaaacaattttctttttttttttatgtttaacaaaagagaaatagtacacacacgtatttgggaaaagaataaaaaccatgtaggcacgcagaaaaggagattctagcgaaaatgtgatgaggaagaatcgaatgattctccataatatgtgctgcattcattttctgttgcacagatgttatggaggatttcagccatttactattgtttgtcgaacatctttaaaatgtatttggaatttctcataagaatatagctggtagaaaattaaaggccaactggagtactagattctgccgctataaatagttaaataccccacagagctacttcagaactcaagaaacagaggaaagtaataaaagaaaacaaagtttgttgcgtcaagagaataacgaggaagaatggcaagcactgttggtcaggttatgcgaaga

SEQ ID NO: 17 - DNA, 3080 bp, Poplar sp.
acaatccatctaaccgtagactaaaatatattatgttttatgataactctaagaggtaactcaactgatcagatttttagtttgctctttaataatcacgagttcgagtcctttcagggccactagaggcttacatgacgttaattttaggaccgtgagattaatcgaggtacacgcaaactgacccggacacctacattaatacaaaaatatgttttatgatgattgaaactaattagaaattcattattaatagaaagcatatagtttgaagaaattatcaaacaagataagatggaatgcaaaataatccttataggcaataagctttcagctacactcaacatgtacaaaataatcccatatataattaacttcacttaaagaataatatccataaattgataaatatgcaatgagacttgaactcaaaagttcatctctcttaattcctaagaggagcagttaactttggataaaaattgaactgatcatcattaaaaaaacttaaaaacaatgaatattttgaaagctccagctctcctcgatcgaatcagtaaccttcttgcacactactaccggacctgaagcgtattggccaaggatactattttgtaaaggatagattgcatgccgacaccctctattttgaactgaaagatttttgttttttgtttttttgtttttaggtgagtgtctttatgtattaaaatagcaagctatataactatttagatagtgactcagtggtaagagcttgagatcaagaggtttgctccctctgtggtctcaggttcaagccctgtggttgcttatatgatgaccactagaggcttacatggtcgttaacttcagggcccgtgagattagtcgaggtacacgcaagctgacccgaacatccacgttaaattaaaaaaaaaatagcaagctatattccatgaacaggtagccatttccattacaaaattcaactaatccacagcaagtggactgtgggactcatcttaattgaaatttataaatgttcgcatgttacgatcgatccatggaagagtagttaagcaaaattgaaagatggaatttaaaaagaaaaaaaaaaatagtgcaagctccttcactgtaatatgaaatagctggatttccccatcatcaattgtcacttatttatttatttattattttcttaaaaagaaaaaccatcttgccatttgctatctaaattacagcgccgaacaaaacaaatcacacagcacattggtactgaacgggtccttcgtataaacagaaaatgattttaaaaaggggaaaaaaacactataatatttcttagaacaaaaaacttaacatctacgaataaaataagcaaccatttgctctagtagatgagatatttgtcctgcaaggatctggccttctctgaaaacgccgcgttgtgtgtttatacgccaccctgctaggtgctatctagagcgaagccatgagtccccattggaaagatctaaaaggtgaccaaacactcttgcataaacaagtcactaaggacgaagccatgaatctataaagaaaaagaaaaccaacaaaaccagctgtagaaatggaaaaccagtaaccttcatgccatggcgccaatgagtctgcttctaccaaatcattgccactaattccaatttagataaaataaggatggaaatttaattcatacccgttcctactacgtcaataccgccacacggtatttctaatttagataaaataaaaataatcaataaccatggaatacaatctgaatgagttgatattttttaaaattaatagagtatgaatattattaaactcgaaccaaaacttaacccggaatatatatatatatatttttgtaaattatctagattttttttaatacaaaataatatatacatattgacttaaaaacatatatataaataatatttatcatttaatatacatatacatacttcaaatatatatatatatatatatatatatatatatatattaactattttatttttttattcataaattataatagataacaaatactcattggataataaaaatttaatgaatagtttatagatatttaaatttcttacttgataaataatgaagagagtataaatataaaaaaacccaactcatgggtactcattatatccctagatacaaacaaaacaagcataatactaataagattcttataattttttttatatcaaaatagatagtttcgttctgttttaattgaatttaaaaggatagatgtggtccttgtatatatatatatatatatgaattatggtctgaagatattttaataaaattaaaaaaattgattagtccttgtatatatataaaatacggtttgaagatattttaataaaattaaacaattttgatatacgcttgatatataattaaaacatttttcgaaaatatttctatctgaaaaggaaaacaacatatgttttcggaaaacaaaatgtcgtgtacagggaaagattcaaaattagagtttttcaagtctaaggtaaagaaaaatcattgttttataaattctgaagtaatttctaaagttgtttaaatagaagttaaatcaacctaaattaaattaaagagaaatctttttataataattagaaaaaagaatttaaaaacaatattctctaaactaaacttgaatatattcctgactttgcctgacctaaaaaatggggtgagataatctaattattaaataaaaaattataactatttttatataattgtttttttaaccttgatcctatccatctggtctgtatccgctatacattcaacgtaaaaaatgcaagaaactgtttcccaaagacttccaaagggcaatgcatttcaaaggcacagtattaggagggtttcaaaaattttgattaatttattttaatgtattaattaatattaaaaataatccactgtcccaacacttagaatgctataaatacccctcaagaacaagaggaagctaatcgaaaggaactatttgtgacgttaaaagaagctagaattttcattttaggaca

SEQ ID NO: 18 - DNA, 3027 bp, Poplar sp.
aagttaggaagaccatgtatgcttatcaaagaattcattgtatggcttgaatcagtcataaaggtagtggtataaaatatttgatacttttatgcttggacacagttactttagaaatgacaatgatagttgtatgtatttcagaaagctctcaaatggttcatttatgtacttgttaatgacatgttgattacctccaagaacatgtatgaaattaacaatttgaagaactaattgagtggtgagtttgagatgaaggatttaggtacaaccaataagatcttaggtatacaaatatgcaaagattgaagtcctaacaagttatacttgtcacaaagaaagtatcttaagaaggtacttgaatgttttggtatacaagattgcaagccagttagtactctacttacaacccattttaggttatcttcaactttgtcaccataaactaaggaggaaaaaagcacatgctaaatgtttcatatgctagtgtagtaaggagcattatgtatattatggtctatactcatccagaaatttcacatgttgttagtgtagttaacaggtttatgataaatcctagtaaagttcacaggtataccatgaaatggatgctctactatcttaaaggtactacatatattggtttgatatataacaagagtagtggcactagaagtaatgttaagggttttgtagactcagattatactagtagtttggatagaagaaaatcactaacaagttatgttttcactattttagggtgtgttattagttggaaagaaattttgtaattcattttttccttgtcaataatagaggctgagcatatgacatcgacaaaaggagtgaaacaaactctatggctaagaggttcggtttgtaatctttgtttatcacacgagttgatcattgtgcattataatgactaaagtgttattcatctagctaagaaccaaatgtatcatgatagggttaaatatattgatgtcaagtttcactttattctagatatcatgttgtaggatgttatatcagtgaagaagattgttataacagaaaaccctgcatatatattgacaaagcctatctctgcagtcaagtttaagcattacttgaacttaattggtttgtgtagtacttgagagatgcttggtggaggcaatgaaagaggagtttaagtttcataagttgactccatttaagccaaggtggagatttattaggtttatcttaaattgtagcagctctatgggaggaaataaatacctatgttaacctaatccatataaaaaatctaaagttatcatatttacaagtcaaggcttatttgtgagtgtttaaattctttatatttttatggctagatagaagagagaaaatatgagttttgagttactttggaatttgaaatattttactttttcaaatgaatttttctaataatctcatccacagagtagatttaagttgccaaactataaaaattttattagctcctgtgtaattaattatgtttatttttttatatttttcttaaattaatttgaaattttaagattgttttaattcccaagatttctattgtgcttcactttgatgacataatgtttagtggagttagccatgggaattgaaaggtttcctaagagggacttcataggaattaatagaccattgtaaaacttttaaagagttaaattattcatatattatctaacccaaaaaaaaatgcttaaatactatttttcatcttttaatcgaaaattttcaaaattagatgaactaaagctgttttacaaatgattagcctcttttcattcaaaagatatttcaaacttattaattatttaaaagagaaagaaaaaaagaacaagaagaaactattgttagttgacctataataaattaatatgtattaattatataagtcaacttgcagttaacaagccaaaagataaaataagaataaaccacaaaacaacaactggaaatataaaaccacaaaggctaaagagaatcaatccccaaccatgatagaggtttcaaattgaatgtcaaactacaaaatctttcaattataccctcctactatcatctcttaaaatcagtccctagttgcatcttacaagggaaagccaggttttcatacgcctagcacataaattatattttgagtgtcaaaaactatttgatatcatagataagaatttgttttaagaatataatttatacaaatagagagttttcatacgcctaatgttttcttcgcaagctatatgttttctggtaatatgatgatgttgtttcaaatgaactaatttgattaccaaacaaagttgaccttagtggaaagggttagttgtttaagcaagtggtctcgtgtttgagcccttgttaatgcagcaaattttctttggagaagttccagttttgatacccgacgtaacctcaaagggaaataggctatggatgccttgaagaataaaaaacaaccaatttgattaggagttacaatgatagaaagatttttttattcattgaggaaagattaggatcagaggagtcaagaggaagatgagtttttaaatccaacttcactagaaactaatccttttccttaaacagattgattattactggctgctagctagagtggacattgtaaatttatatatatatatatatatatatatatatatatatatatatgttaacgagccgttaacaaaccgcaagataaactaagaataaatcacaaaaccactactggaaatataaaacagggaatcaagagaccatggagccgcaggtccaatacagaggaaacaacaaaacagcagagatcgtagatggtttctctctttaaaatacttgaaatcaatggttaaccataagcatgacagacacacacatgcttctgctactataagaacccacaaagacaagcctttctcttcacaacacaagaaacacaaagttcgttcaacacaagaaacataaagttcgttcaagacaagaaagaat

SEQ ID NO: 19 - DNA, 3065 bp, Poplar sp.
tttacaacatatatatgttatattcacacggattatttcttaattttttcatataagatattaaaatatcaaatattttttttaattttcctggtttgatgcgagtcaacttatgtaacccaggacccgatcccctggccaggtcaaccccaaagtcgggtttgataactatagttgtcatgaaaatatattttatgatttgttatgttttttgaactatcaaaatacatttattaatctgcataaataattttttataaaaataaaaatatttaacccgtgatgaagcgcgggtgaaatagctagtaaaaactaaataatgtttaattgtaggctaaattaaaaagttgagggagtcattttccattcgaactcgagcgcgaggggctctccccaaggagagaatagtctcttactttacgacactacttgtgtctagatagttgatcttgaaaaacgtcaaaaaagaaatctaattcgtgatttctcaagatttcatttaggaaggatgtccaaagatggcgacatgatgttgtcatttgcaaggcagtaacaccgacttttctagagctcattttgactcacaagagtctcgttacccatcactcagtccatgatgattatttgtttttttagttgaaatttaatttaatgtgtttttcatgttatttttcatgtgtgttttaaatgatttgaacgtgtttatataaaataaaaaataaaataaaaacatgacgcattgcattaccaatcacgcacataaaatccttcttctttatcctctactatttatacatttcatgtttctcgacaaagcttcatgggcatgcctttatcatttttttaataaatttcaagacaacaacggttattatatgctatatatataaaatctataaattaaaaattttaagttttgattaaattaaaatcctactcaattttctaataaactcttttatttaagttcaaagttatttctaactagatatatttgtgattttttataagttaagtataaaaataactaaaattattttacaaaaattataccagatgaaacgtagttttactcctttttttcccctctcgtttccttcatattatttcccaaatattctcatacactaaacacattgttaggatccttgcagcttagagttgctaatcaagcccttttaattaaatcaactttaaaacacttcttcatcataaataaattaattaattaagtgctcctggagtttttaaccatcttccttgctaatctaagtaggtataaatttgattttttttctttcttgaaattatttttttatgttttttaattattttaatataaaaaattatattttaaaaataaaaaaatattttgatatatttaaaaaaattatttaaaaaaaatcattactgcacttcgaaatgtcattttgaaacacggtgcaattgacttttctcaataatctctaaatctttatttaatagcgagattactgtcacaccaaaaaggtctaaggctttttgagcccaggtcacttcccttgcactcacctggctctcaaatctgtcaccaaagcccacaaaagcccacttttgcaggcttgtttcaaaagcccgaaatcaatacgagagactcacatctctaaaacccaactaatttagagcaggcccaccacgaacccaagtcactttcgcgaagaaagttccaagtagaggcatagttgtggcccaggctctgaagtctgaactagtttaggcctagatacatccgagtgaattattattatttttaatagtattattttttacaaaattcaatagtcttaagtatcaattcattaggtcgtcagtataaaaacaaacagttcaaaataaaatttaatttaaaacaactcttaaattatatatcataaaatccattccacaaccaaactagattttgaacctatttatttttatatttcaaaaatacttttttaaaaaattaaatcgttttacttcaaattaagttttttttatattttaatttttttgatgttttgatattaaaaaaaaattattattttaatatatattttttaaaaatattttttttaaaaaatactaccgtattatttatatttcgattgatgatttggcttagaataaacttaaaaaattccaggtaggcttggcagttaaaataattgtatttatcattaaataaatgattattccattgcatttagaatttctcttgcagaacgtggaacatgcctattggctaccacagagttgtcaaagcaatgaccttgtacgaaaagattttgttccttcttggtcataaattataaatctggctcactaataattaataaaatcattttttatatttaatatcaaacaatatattttttattgggtttatgatttttttctgtttgataacaaaatatttaaattttttttaatcttttaaattcatatattaaaattaatatttacatttagatgatatatttttatttttttctaaaatatttagattaggttataatgaaattaggctgggagagattatataaaaaaaatataagaatttaactattgaatatttggtcataagaattttagaattgtaatactaagaaaaataattctaaactatgattgaattctatgaatgactgttaattaaagtatgataaataatataaaataaatgataatattaatacatcaatacttatttcattattattaaagtgttattattgatattatcatttattttttgttcagtaataaaaaaatattattcaatcagttaaacaatcttatatcaatataatatattcataaattatcttaataaattatttttataaaaaaaccaaataactagtttttttttttttttttaatatgatggcctcttattaaaaaaaaagaaaaaaaagaaagaaagggggaactccttggcccctatttatctataaaaaacatccacaccttcttccaccgccactctcttagctctataattgacttccactgcatccatccatccatccatccatccatcc

SEQ ID NO: 20 - DNA, 3000 bp, Poplar sp.
ctaatgggttaaaaccagaaatcaactaacataagttcactaatgaaataaacttttaaacaatgtctaatgggtcagaacaaacctaaattaaagataattattcaacatcaaataaataaaataagataataaaaacaaactctttatggtagaattcctccatgtatctgaaatctccaagctctccagagtggtttttttgccgaaacgtttagtggaggaattcaactagaaaactttattttgattactagaattcactttccttgtattgcctcctcttagtctctttgatgtgctagaaatacctgcaaaataagaagaaaaaaaatcaaggagaaagatccccttattagatgtcgtcacatcaacttcatgtaggacttggaatcctcgcaaagtatggacttcaattcttcaatgaattcaaaccacattaggaacccttgtagcccaagaccatgcacaagtttaaggcctaaataaacctaatttaatatccatttgttgtccaaaactaacccattacaggtctgaatcgaatgggctaaaaatagccaaaaaagaacactttgtcgataaatctgtcaaaacagtaacaacaactttaaataatttattcccgaactttgattgacctgagattttatcacactatagtttcatatgtttaatacctcattataaattttaagctcgatttcaatatacagtttgaaaaatatatttgattttgcaaaactgatctatttaaaagcaaaattcatacccaacttggtttctaccttaaaaaaaaaagaaaaaaagattaatatgtgaattacacgcctagtagtgtagtgattgcagaagtccaaaagcagtcacatacctaaaacccaactgagatgtaaggcaggcccaccacaaacccaagtcattttcgatggagagagcacagaggagttgtcaccttcgttctgctttgaagggcctagtagttgttgtttagaatttgcatttctcctctgatcactaaagttcaaacttcagagagttgaatattctaaaacgaaaaatctgtgctaacatcttgtcattatcggcagacacaggcaggcaggctagataggagttgttttgcatttttaatttcactttggtacactttcgtgcagcgtttcgttttgcatttgagccatcaccacctcgaaagtcaatagtcaaaagtcagtccagggtggcctaacaacagttcaataattgtatttatcctttggtgttttttttaataaaaatttaattttttatatatttttgaatttttttaatatgttaatattaaaaattatttttaaaaagtactaaaaatattattttaatatattttcgagtgaaaagtattttgaaaaccaatcactactacattctcaaatacctcgttaatcattcattttcaaacctcaaatgttttctttagtattctattaattatattatttaaggtacaatattatctttttcttttatatttaattgtttcacacatgtatttcattacatttataattttctttgttcgtagaacatggcggataaacccaaatttaagagcctataaaacctaatatttttctcggctcatcgaagtgaatgacccatttcctttgggcatatctacatttcctctagtgtgatagcttcattctccatgacagcttgagacggtcgacctcaaaaacataataaaacccttgttttatggccaaatatatagcaccatggctaagtatgaattcttctataatttcaccttaccctcctagaaaattttctaagtacgaattcctccatagtttacctctatatacttagaaaattgtttttcaaacatgggacatacccttacacactcatcgtactaagtatattaaccggggttttcaccccgcttctcaaaaaatattttttgacaaactcgtcgtattgaccatatttacaagcctttgcgtataaatatcacaacgatttaggggggctattgataaattcaaatttaagggtctaaaccccccataaaactcaatctcatttgggctcagtcaagggaaggaccaacctcttttgagcacaactacattttggatcatactctctctacatacattaggtgtataaaagtcttcaaaggacccaccatatttctatcgatattaatgcatatattaggtatttttctctcattaatatacatatgtgagggatattttttcttattaatacatatatcagtgatatttctcatcaacatcaatacatatgtcatgaatattttttctctttaatattatcaggaaaatattacactttagtcattcctctgcataaaaatacttatgactataaatagaccataaattctttaaacaaaaagtttggaattttcattctctactacatatttattttcatattgtctctgtaatattattgtattttctcttaaaaaatcactgatttaatcattgaagagtaccttaattcactacaaattatcttttacaagtattaaatatcttgactagagatgacaaatcaaattactaaaatcaagaatttaactaattatctaaaatataaaccttatcccaaactagtaggaggtttgaagacgtcagctggatattaattgatcacattccttctccatcgcaatttattaaattatattaacacataaaaactgtgctatatattgtgaatgggtacgtacgtacgtcgttttggtttaatatatattataattataagtataactatagtaattagaaaaaaatagaagaatttaactttacaatatttagttacaagcattttattttattttattttattttatttttttaaaatcccagttacttatcttatataaatcccagtcctctttgaagttcccaccatttgcaatcttcaattctttctctcgttggtttcttctgttgacttcactctccatcc

SEQ ID NO: 21 - DNA, 3022 bp, Poplar sp.
gcttgcacacacagccacatgctagcgaagaaggaacacaactgcttttaacttaaaagaaatttagaaatgtatagtttgcaaaggaaaatgctcgatggctcctttggctttggcctttatgattttttgaattttcaatattgttggaaaaagttgtggtttggaacgtattgattagggtatcacaggctagctttcatttttcattctaattaaggaattaattattttctttaaccaagtcttgtataggcaatccatgttagaactagtatattaattcccaagaaattttttattttattttaaaaatgattatattatatggaaataagcagcaaaagtcatttttggagtccaccatagaatggtttttggttggagcttaaatcattcacaacatgtgctggatcggcacgcagctagctagctagcttctggtgtgcttatgcatggatgtgctgatcttgatatcttgtggagcagcatcatcagcagcagcttcagcactcaaaggggtgcttgccacagctaaaaagttgtacttcaggaaacaaaaaatgagcctccatttttcacaaatctcaacctttctttgtaaactttcgatcaatgttgttttgtgtgagcataatcactccattaacaaggtcaccgcattatcgtacgcagaattaaccagaataattcttcataaaaccaacaaagattggttgtagtaatcttgaaaaactaatttcaccatcatttataaaatgtgtcaagtaataactcaagcttagaacaatggactttttcaagaaactaataaagctctgcaggaccaatcaacatattctatgaccattctgtcaattttttttttaatttttatcacaggtaatttttgaatttttttgcccctttctaactgtttcattatatatatatactagctttgatacccgcgcgatgccgcgggttattttttttgcataaaaaatattaaaaaaaataaaactttaaaaatcttgggtttttctataaagttatacccaagaattttggattttgctgcaacgtctgacctaagagtaatatttataatattaataataaaattaaacttgtatgacccaagtttaagtgagtctggctgtaacaccggacccaagaatactggatgtgggtctggctataaggtcgtgtcataaaagtgtgataactaaatagattaattaaaaaaaacaaagaaaaaaaatcaacaggaaggaaaaaactaatgaagaaaaaaaaaacattgaattaattgggtcaaccttttaaaccaggttatcccgttttgcgtcataaaagtttgataactaaatagaaaaaaaaatgatgggtttacctagaattaaccgggttaacccatcaaaccaagttaacccgtcaagcccaggatacgtgtcataaaaatatgaaagtctgataattaaatagaaataaaattaactttaacaaactaaactaaatgaaaaaaataactcgtcaaatcaggttaacccatcaaacccgagattcgtatcatgaaaatctgataactaaataaaaaaaattaacattaacaaactaaatcaaacaaaaaaaattcattaaaaaaataaaaagaaaaaacaaaagaaaaaaacagttatataatataatacaatataataattattataattataattataatgaaaaaaagtggggaaaattttaaaaaatgaaaaaaaaagtggggaaagctaaagttaaaactaaattctcaaccaactcaatattttaaaaaaattaaacaaagataatttaaaaaaaaaacatgtgggggaaacactgtagccaaacaaaaaccatgtaagggaaacactgtagtaattcatagtatttttttttataaaaaagctagaaaactaatctctcaaccagctcaatatataaaaaaaaccgacaaaggttatctaaaaaaaaagagtcaattttgggtaaaagaaatgaaaaaaaaatgtacaaaaaaggaaacaaaagcgaaaaaaaaaccacgtggggaaagctacagtgttttaaagaaaaagacaaaaaaactaaattttcaaccagctcaatagtaaaaaaataaaatcaacaaaaataattctgaaaaaaataaaaataaaaaaaaataaaaaaaaaacttatggggaaagctaaagctagattatcagccagctcaatattgaaaaaataaattcgataaagataattttttaaaaaaatatatgaggaaacactgcagtaaaacaaaaactatgtaggggaaacactgtagcaatccatatttttttttttaaaaaaactacaaagctaaattctcagtcaacttaatataaaaaaataaaatctacaaagaccattttgaaaaaaaaaagaataaagaaatcataaaaaaaaaataatatatgagaatattatagtaatctataatgttttaaagaaaaaagctagttaaattttcaaccagctcaatatttaaaaaaattagcaaagataattttgaaaaaaaaaattaaaaaaaaaacaaaaaaaagaagaagaaatgaattttgggtaaaaaaaaaaggaaaaagaacgaaaaaaaaatatgagcagtttataattataatataatataatataataataattattataatattcttattatagcgtggggaatggggaaagtggggaaagttaaaaggcgtggggaaagctacagtgttttccccacgccttttagagtattacttaatatatatatatatatatatatatatatatatattcaccaactaccaaactagaaaaaagagtccccacttcccagtacctaccaacctacctacccatctttgtttcctgccattaaataaacagagagaaacgcaaactctcattgattctaccatctcgtttgcgaaaccttcaagattctcttctctgccaccatatccctttgaaaaagcaatcaaaatgtcatcttcgatcaagcaaccca

SEQ ID NO: 22 - DNA, 2846 bp, Poplar sp.
cagaatcaagaaaacaaaagggaattaaaaaagagagcccccctccccaattcttgatgtagtataaagaattcacttaaggagaagtagtcgtgccacatttcatatatgggggtagtgtctgtctcccttgtgcactccattgtcatgtccgcttgaagtcatgatggacctcatggctcttcttacttgtgtcagccgatcactttatgttatcccctcaattgtattgtcattccatttcctcgggtgtcatcaatggttaggctctttgtcctgactatgtctgtgctggaagcccaggggtctgcgtgtaggtgtatgagtgaaggccgaggattggtgccttttgaaattcaaagtacttgccatctatttgccacgtctctcattagtggtggacgtgttgaggggcaatagggatgaatcatccattcaagtaaacaatgccaacattttttgctatgttggtagatctatacatggcaaggagttggtctttttctttattttcaccatttccattcactttgtctacctttttctctctctaaatgattttctgcgaggcaataccacatccgaccaccactaaaacatgctcaaattcacgacaaaaccccatttctcgattctcccatagttgctatagagttttaggacctttattatgcctttgagttagcatttctaacgggtccatagcgttcttatatgttgttctcgtttatttccaccaaaatccaatcatcaggattttacaaggttagatactttttttcaacttgaagatttttctaattatagcaaacctaagtaggatagaatcttggtctgtactattcatagtggagatatctctgaagatcagttagtaaaaggggctaggatacaccatacaccttacgaggggtgcaacttctcatgcatgttcagatacggacacgacacttcaaatattcatagtgtatgcagaggcatgataatacattgaaaattattcaaaataaattaaaattcattcgagtttcaaaaacggcattcgagagctgctggaggtggtcggaaactgttggaattagaactgggcagcgattgtgcgtggttacatgtgctatgtttacatggatattggcgtgaaatggagcaaggaagagggatgcgtgactcacacaatgtcttcgaaacccatgaaaacggatataaatgaaagcttggtttaagtggagatgtgttggctactttgatcgggaaaggggagttgggattggtggtcgcaaccgtgctttgatttttcatttagttgaggaagatcaggtgctgtggctactcttttggcacggtgctgctgtgttttttattcttttttcgaagatggctatgtgaatgggctgattgttgcaatagcaggttgtttggttggctggtgaatgattggcgaggatggttgttaaattttagtcatgatttttttaaaattgttttttatttaaaaatatattaaaataatttttttatttaaaatttattaaaataatattacaacggatattatttctccagtacttatttatatatctttcactatattatttgattctctataattcttacttatcatttctttttataatattttttattttttatttttcaatctcattatttaatatgatattttatttcattttatcggttaagtattacgttgataataaattaatttttatatttttttatcgaatgataaaagttccccccacccctcctttatttatgttttggcttttttatcaaattttattttttaatatgaagattttaattcctttaagtttctttattttttttttaattgtatcccttaatatgagctttttatttaattttatcatttaatattgtattgatttttttttctgaacttactcaatgaataaggtcatgtcaagataattttcacataatttaatttaagaatcgggtttaaataaatacacgggttgggattttttaaatttaaatagttgtaacaagttttatgataatatcaaaaaaaaaatttcaacaatttagatgttatttttttatattcaaaattttttttaaagcaacacgctccgataacacggtaaaacatcattgaattgaattaataaaagtgatggaatatctaattttgaattataattcagaataaaacatgccatgagctgtgtcagataatcctcagccaactagcctgagcatgctctctaacataaagtcctcaacccccagaactctgtctttatcaaaataaataatttgcctgtattgtgcaagttgaacacttatccacatccttgatttagactacgcaaaaaaagtaaaattatttcccctcattagaacaataatttattctcatcttgtagcctccaaataatagcaaaaattagccagagtactgattagacatgctaattttggttgaattaatcccttcagacttttctcaatatatagcaatccatggttgttcatgttaattctagcgtgctcgttggctttttttcagattacaccaagtttacatctctttttagctagctacccaactactataaatatatgaatgtaaacacatgcatgctgtagtatcaaacataccaagagttatcaaaacatggcaatgctcttgcaagcaagaagaatattgacacaaaccctgccgagatgcaactcaaactcatctcaagccttcgttaagttactaggatcggcgtctcggggcttgcacgataatgtgccgggaagtaagttgttcgatccgaatgcgacgtcagggaaagtcatcacttgca

SEQ ID NO: 23 - DNA, 3025 bp, Poplar sp.
taacatactttatttaataaaaaaatttcttttatagaattcacttatcttaatgttaatttgcataaatatagagtctttgtgtatatattttatctaggtccaacatcaatatttacttaaacattcctttttttttagtttctaattatttttaaagttattaatacgagttaattcacccaacttaagtcttaagccacgtcatggaccaacgaggtattgtaactatcgttttacctatctctagttggccatctcgtgcctctattgatggtgtacaagtcccccttctgttcacatttaatgctaactactatcaaaatgtcgcgtatatatatatcatgtgcatgcagaaacaaactagctataaatatatatatagtttcctcacagggagacaggccccttgcttcataaatattggcttccaatcatgatctaattctaaatcaaaactgtctgaatgcagacgccaggccaattcaactttgttgacccactgaccatgtgtcaatatttaattttcccattgtttcagggaaagaatggaaagcaacatcttctttcttcgactacattaatttcccccctcttatttaaccccttttccttctattatttttgtattttctgttatattaagcatggtttaaacttgattcagtattaacttgggataagacctgcgtcagagattcaactcaatttttttaaaaaaattatatattattttgattttaaaaaaaaattattaatggattttcaaccttattttatctggagcgtccgaatcccaggttaattctgatttttaattagattaagtcatgttaacttatttttttatatttttttttaaatccaaaccagtttaggttctagatcaaaaaatcaagtcattacaggtttaaaactataatattaagatcatgtgaatttttttctcttaagatcttgtgaattttttttctcttaaaattttcaagggttgcatgcctggattcattttcaatgatattagttcattcattcatatatatatatatatatgattaggttcatagtcagagatgtgctccttcgtttaacaaataaaattccgaactataaggaatagttttttatataaattttttaatttttcttaatttgagtagaccaaaaatatagattcacatcatgtttgttatttccatagctttttcacaaagagtaatatatttctagctatctgcaaattttctcttcgacaaaacatctaatactatttgagtttttttttccattgcaatccaaactcacacctctaaaattaatccaaaaatgcaatttaactctatctttctgtctatctatatgtatttttttttatgagttttcacattccggattaagccaatctcttcaatttaattaaaaaaaatctatgtacttcaaaattacaaaattcataaaaactttacttctcacgtcctatattaaaaggatgtttggtttagagatgtggtgattttttttaaatatataactcttttaaagcacaaactacatcttcaaaaactaaaaatatatattttttgtgtggatcccaaaataaatactagaatcaccttcaaattaaacaccctctaagatttgaacttcgtgattcccccggcttaaccatgatctctttatctttatatttatatatataaacttgtcaaagtcatagcaaattaatcattcaagcaagataaatattgctactaataaattcaaacattaatagaggggatggatttttttttgtttaatgtgggagcttttgtaagagaattaaaagagggactaacaataaaaatgacaaatgacaaatgagcaaacattaaactagaatcattttctattcgctatcgatgagcgaggtttgatcgaggttgctgcaaatctttcgaagattatgactttttcaaggctgttatgggctggtaggcgccctaaattgaacagcttccagtttacttatatttatcccattaataaacaaagacttcgcttccatatatatttcatgactctgatcagctcagtcattatattttaatggtgtgagagcttcattattggtggagcataaaccatcaacgcataagaaaccttgcttactcatgaatcggtgaaatgcggcattaggagtaaattaataacgttagaatttccggttttttgtttattcaacaagaggtctaatggatttgaattacatatttaataaggatagaatttctaagtttgaatcataattccaaaataagagtgccccaacaaggataaagatatcttgtccataattcagagtaaaggaagcatccaaatttagccagcatccatgttttttaacctaagctgtctctttttgaagagatttttacctttgattgactatatatatacacacatttatatatgcaagtcagatgttctagtcctcaacccaaatttcagtattctttttttctcaaaatatataattttcccgcatttctcaagttgaaactcttgtcctcatcctcgatttagactacgcaaaaaaaaaagtaaaagcattgcccctcattagaacaataatttatcctcggccagagtgctgactagacacgctaattttggttgaattactcgcttcagacttttctcaatagtaatccatggttgttcaagtcaattctagcgtgctcgtttactttttttaagatcatacgacgtttacatctctttttagctagctacccaaatactataaatatatgcatgtaaacacatgcatgctgtagtatcaaacataccaagagttatcaaaacatggcaatgcttttgcaagcaagaagaatattgacacaaaccctgcctagaggcaactcaaactcatctcaagccttcgttaagttactaggatcagcaacgcggggcttgcacgataatgtcccgagaagtaagttgttcgatccgaatgcgacgtcagggaaagtcatcacttgca

SEQ ID NO: 24 - DNA, 3161 bp, Poplar sp.
aatactgggttaagttgggcatggccctgtttcctaaatttttaaaacagggcattatgtattggtccaaaaatacatcctccttcctttctttttctttttttctattttttccttctcttttcttcaggttgttttttctcctaaacactcttcttcttcttctttttttcactctggcactatcacggcgattccatacataaatatactgggatctaaaacaggtgacctggatcgtaaaacgtaggggttttcgactaatctagcaactttgtttcagtattatttaaagatacatgattcaatcttgttgacactatataatttattaacagcagctgcttttatgatgaaagtgctttttatttaaaataatgtttttttttatttttaaaaattatttttaatatcaacgcatcaaaattatataaaaacaccaaaaatatattaatttaaaataaaaaaaaataaaattttttcgaaaaaaaatttaaaatgcaaaatcaaacaagatcaaaataatgatacagcagatttgagaaggggcatctgcttaaagaaagaaaaaagaaccatgcatttgactatagtctagatagaaatcatgccaatacaccaatggtttcagcttgtactaatgataatcagagggcaagactaaatgcaattatacatgttctttatagaaaatacatttaaataaataataattaaaagaaaaaaaattaaatctgacataaaataaattgaactaaaatattaagggatataattgaaaaaataattcaattaataaaataataaaaaatattgagcgatgtaattgagatgataatttaatcaagataataattaaaaaaaacttaacaataaaaagaatgagaactaaatttgaaagataaaaaaaaaaatcaaatgaaagttaaattaaaaaaaaaattcaactctatgaattatttaaaataaaaaatagcaataaaaagaatataaatcaaatatgaaagaaaaaaaatcaagggacgactatgaaaatggatagggaaaggctttgaaaccgaaggagagaaaaaaaaagaaaagaaaaaaaaagtcattggagcagaacctgatattttttttgtacaagcgccgctcattaatggaggagacactataaggaataaaacgctattgtagaagttgtattttgacctttgaaggatgcttcatgcatcagacaaagatcgtagaagtattcatgcactttcaggtgaacgtgacgcacaactcatttttagaattaattaatatgttatatacatgtctaaataataaaccatcaataatcaaacttgataataacaaaaaaaaatcaaatggaaaagatattaaaacctcttgacccaaaacgaagacaagtttaatccaagaacatttcggtaattgtattgtgtatttgtaatggaaaaacaataacacccttgctcgcgaacttaccttttcttttgcctctaagtgtatataagatattttattgtgcacaaaacaataaaaaaacctctttaccctttctctcaaggccaattgtgttacatttacagatgaaaaaccgtaattttattgttccaatccataatgactttggtttcttttaatgtcatacagcaggcccaaaggcctagtaaatgctttcacatacaaagaagaaactacatgtcactaggtggggcactgccccctatcccgcaccctcaatataactgtatattttgatctagtggccaatttaaacctaagcctagcttgagctcgactgagagatttattgatgtttcatttaggtaacgacactctaataatggttcaagcaagccaaacaaccattcaagcgttgaatagctcattctagagatggttttgaaagagtcaagatgaaaagaaccttattccaactcattaagttgatttgtgagttcatggttttcaactcagtatctaatttttatagttgagttctctccagtttcttgaatgtcaagatttgagagcatttaaagtgaactaatgatttcttgagaagagagaaaataataaataatttgtaaaaaaattccatgggaattggaattacgagaattagagacaaatgaaaggggagttgacgcagggaaaaaaaagagaatacgaaggagaagcttaaagacaagataagaaagcaaagcaatataagtttttgatgttcatcacattatttctgaagaaagcaaagcaaagcaatattataggttttttagtcattaactctgatccattacatgaaagatagttaaaataagatttaaccttgaattaaatgagtttattctaattggtctaaaagaaaatttacggtattgtttagttgtttatatgaaataataaatacaaggttaaattgatcattttaatttaaaacttttgattgatgaagaatattttctataattcttagaataataaaagcaaagtgtaaaattaaataaattataggataattaggataattttctttttaaaaaatatttttacataaaatatttatattgtgctataaatcacaaacttacttttgcttaaaattttataaaagaaaaagaatcacaagcatcataacttttttttttgttactattaatatatatatatatatatatatacatttagtttattactattaatattggtttgtcaggttatgtgattgaacgtgtcaaattaatgaggtaaaatcgtggctgagtccagttcgattgctatgccgtggtcccagaacaacattggcctcagattcttaaattgggtggggatccactagtgactgtgaggaggccacgtaacccactcttgaccgtgtgaagacaatcgaagccacgtgatccaatcagccttttcattagatatagatgacgtggaagcaaaatgcccgctcctctcttgccccatcggctatataacagcctaccaaaccaccgtcagattcattaaatattcatcattacaaagcaaaaagctccagcttcaactcactggtagtgatatttcttactgaacgctgcctctagcattcgaatagctttcacagtttagatattgattaagtttcttaatcacagatcgagtgataaacattgttctaagtg

SEQ ID NO: 25 - DNA, 3000 bp, Poplar sp.
ctttctaataaattaagcaattcttgtcggtgcatgatgccacctcagtcatgtcctatccaacggcgatgcaaacttcgctgtcccgcactttttcataggacgaggtgaagtttagctatatatcttttttttttttaatttaaattgttaattctttatatttttatattcttttaattttatatttttatattattttgatatattacatcaagaataaattttaaaaaaataatttttaaaatttacttaaccacgcaatacataaaaaataatagaacccaccaacctaagaatacttgtcaatgcatagaagtacacctgctagttcttaaaaccaacaaaaggaagcaaagtagatctctgagtcaaaaaccagaggaaaccatagaaacacataataataataataataataataataataaaattaatttaacttggtgtaataataaaattaatttaattacaaagagtgtaactcaactagtcatgttctaaatttattctctagagattactagtttgagttttacaaattttaaggccactgaagatttatatagtcattaatttcagaatatataagattagttgagttacgtataaattgattaaaaaatcatattaataaaaataaaaaaattaatttaaaggtttaagaaatcaaattaagagaaaagagtggtgttttatttttcatcgtgccctctctcaacagacaagtagaatgatgagagagagagggtaaagaaatggatttatgagaacattgaccacagggaaagagagaagcggttttgtgaaaggaacaatgaaaccacaggaaggtaaagcggtaatgatatatttcacgaatactaaaactagaacaacaagttttttaatcaaattaaaccacgagtgcaaggccgtcttctctgtgtataaaagggtccttcttctttctcatttcccattctcatctgcaaacttctcctttgcaatctttctttcttgcgttctgtgtgttcgttgtgatttgtgttcattcttcttgtctattagcttgtccccccgtccgactgctttctgtatttattctggcattaagcttaaggtaaagatccctcaactatcccaagcaatttattctgtttttatgtgatcttgagggatcttcctcttggatgcgctttttattttttcttcctccttcttcctgctccttcttaccttgtatctgatcccccagacgaaaatgttttttgtttttttaattagctcaacaaatcaaaaacattcagcgcgaaagaaatctgatacagttttaatctgttgtattttaaaaatcattacagttcatgcatgctgatactttaccatgtcatgaaattaaatcccagcatccttttccatagccaaagaaggatcagcagcatgctgatagtttaccatgtcatgaaattaaatcccagcatccttttcgcttgcttatacaaggtcttcgcttgcttatcaaggccactgaaacatcatcatcgtcataactatgatagaacccgcctactgccggcattgaaaacatcatcactagtgtctctacattaaaaaacacccactgtctaatttcctatttttttactcttaaaatgtctttcggcttgagctcctcgggctccacggatggcaactgctgtattatatatatatatatatatatttccctgttggctacatagacctgttaataccgtataaatagataatattaatatatagaattcatgtatctttccgagattaagcgatgccgtataaataatattaatatctttgaatcagtatgtatattaattaaaattaatttttttcaaagtaattttaagagcgcattttcaacatccatttagtttttttttaataataaatctctctttgcattaatcctaacgtttgaacttagtaaattaaaaaaaggaaaatacctttttcaccaatatagaatcaatgaacagcactagtttgcttgaaataaaaataaaaataaaatctaataagacatttcgaaatcatccttatccgcaaatcactacattagtatagtatcttgaaagataagcaaggatcatgcaagtttataataattaaacttaaaacgtactatgacgtgtgcatcattcattcattctgcatgaaactctccacaaagtctagcctttgcatcattcattctacttcattttattttttcctctaatggtttcgattgatttttctttcttagagtctggtcttttagttcaactttacatgttttaggctcgtattttgagagaaaataaagaaaaaagtatgcagatcatgattctgcaaaatactgaactagtgttctgatgaattaacatgtagcatatataatgctggaagaactaaagagcagttgggctgccatgaccaaaagaaacttcgactgattataaatgtgaaaacttgggcccattctttggtttctgtctgttgttttatgccatggcaaaactctgcttatttttcaacgtccaacgtcaaatgggagaggtttaaattctattgttatgtctaaaccacgtggttgttatctatatctgaccgaacattcaagcttttggtattccacaagaagggttttctttcttctttcttttcataattgtaatgtgtttaatttgtttctcgcccaataatcttctctgcttcaaactaactttaattgttcgatctcttgcgttattttagacatgtcaatcacctttcactgttgaaaaaatggttggtgaggttaggtggtaggttttgaagtcttctagaataatgtggtttctctgttgctcttgacttcttcttgtagatcattactggctggctaagctatccatacccccccgcccctacaaataatattgagttgttgctggtcttaattcctattatctgttattactcccactgattgctttctgtttctcttaaggagct

SEQ ID NO: 26 - DNA, 3109 bp, Poplar sp.
aactgagacaaatatcacaaattaacttattaacatataattggttttgtgatattttttcatgtttcgagtttttgattcattataatcaacagtccaagtttaattgctaatatgtttaattttcagatacataattatttttaaattaaattcttttattcgaacttgatttttaacttttttatgtttgttatcttctcacttgttggtttctgaataatatattcacgggattcacagcaccaacaaaccttccacttttcacttctcgggaagaggaatgagagggagaaataactagctctcaagctatcctttcaatttggaaagacaacctcagccggaacccgagaaggcactggataaccaagagagcgagtcactagatgtaagaacccaatataattatccgtacgctgacacattcaaaatgatgaagatgcgttttgggtatgtgaagattggctcggagaaacctaccgccaccttggggataagatttgctaaaaaatatccctatatgaatttgaaaagcattatcacaggtcaatttgtcttttgatatctcttcgtccttgagaggctcagagtacctcaaatcaatccagaaattttattttttttctttctagtcctttctttttagtcttcgttataaattcaatttaatcccttgcatctttgaaattattacaccccacagcataaatacgaagataccttcaccattaaaagaacaatcatagcgcacatcgattaacgtaaattgaataggaaacgggaaaggagcatccaaagttcgaccaatagttgagcaaaactggtttggctttgttttttgttcgaatataaacgaataaagatcgaccaacagggagaaaaatgatgctacagaaaacacgctgaagcatcatcttgtctggttaggcaaaggaataaaaaagaaaaaggtaaaaggatcatttgttcgttgcaaatactgtttagctgattgccctgaaatcccatgactgagaacctccaccgggaccggtttcacctcgccatacatgctcgctggaaacgggtgcggtgccggctagtcaaggtggaagcccacctttgggctagacgtctttgggttctcttccgcccctgtgtgatgcaatgttcggtcaacatcctctgtcttcagaaaaagtaatttgctcttttatcaaaagaaaaacgacaaattctagtaaccaacagtatgcaaagaaacgcattgccaattttttctttttccctattaaattaacttcccatttaattttagatggtttgatattgtaataataattgttttttaaaatatttttttattaaaaaatacattaaaataatatattttttattttttaaaatttatttttaatattaacatataaaaaatattttttaaatataaagacaaactggataaagttcagttgtttccaatgtaactttctggtcaaggaggtaggaccagaaggagtcattcattagcatggcattcgatggttttatcgccagcatgttttagttcggtattatcatcaagtaaccattggaagaataaaaaaaattgcttttattttatttttttcgaactcagccatctttctcgtgtcatctttgaaatagtgattcgatattgatattgtattgggataaaaaccatgaagttatttagaacaaactagatatgttcctcgtacattgtcacggaccacacaattttttttaatgtaaagaaagtggtaaattaaaaaaatattaatttaactatctaggcggtggctcagtggtacgaacttggaatcaagaggtttgctccctctgtggtctcaggtttgagccctgtggttgctcatataatggtaactgaagacttacatggtcgttaacttcatggcctgtgggattagtcgaggtgcgcgtaaattggtccggacatccacgttaaactaaaaaaagatatatattaattcttaattcattggttaaattgataatttaaatatttacaaaagaaaaccaacaacattaaataaacctataaaaaacataaaaaattaatattaaaaaagatatttatatcatggtaaaaagatcattctatcccaaaactaagataaaaatttaaaatatcaagagataaaaaaatcttgatattattataatgaatagtattttgcatcctagaacacgataaatattcataagagaattaatgttttggatgatgaatatatacttttaatttttataatttaaaaatataaaaagtttatttaaaaattgtgttaatgaaatttatttttatatctttaactttgttattataaaaaaatattttaattattttatatttatttttttattccataacacatttagattttattttgaatgtgatcaaactcataattttttaaatgaatgatatacaaactataaaaaatcaaagtaaaacgtaccaatccaattatagcattccaagaacatctcaaatcattatcaaattacaaaaaaacacattaactggataatacacacaagtggcgggatatttggtggagtaaggcgtgtttggtgggtttcaccggcagttttgccaaaatttgatttgtttttgttttaattttttgttttaatgtttttaatgtttttatatcaaaaataaattttaaaaaaataataaaaaaatattttaatacattttacaaataaaaaaataatttaaaaaacaaacaatataactttccaaacagctcctaattcagatgccatttttttttttttttaaaaaaggaaaaccgccagcgccgaggactcagtaccctcgtcccttgttttgagcatctaacagtgacagtttcccaatagcgatcgttcaaaaatcaaacacgcaattctcattttctctttctcagctatttactataaattggcctcctcttcctcatccaaagtaagtaaacacacacacacacacacacacactctctctctctctctctcttctccaatctacaaccagttttttaattcctgatcacccagaccatactagaccatacagcttcttctttgatcgatc

SEQ ID NO: 27 - DNA, 3000 bp, Poplar sp.
ttacaaacaatctttgctacacgtatgtacatgttttaatttaatgtcacagtttcctgtccttgaacactttccctggtcaatgcttcactttctatgataaactatgtctcactaatatgtgcgcgctctacttgttgatttctgcagatatgcaagatgcacgcgttctgtttccattggttagtctccctctacctctgcccctctcgcacactcacccatatgcacaacttgtagcggacaaataacctcttttattgtttttatgatattgtagtgccacctgcatactatgcacatcttgctgcattccgagctcgtttctacatggaaccggagacatcagacagtggatcgcttacaagtggcatggcttctggacgaggaggtggaggagcaggtggtcgagccactcgcggacctgctgccaatgctgctgtgaggcccctgcctgccttgaaggagaatgtcaagcgggttatgttctactgttaggattcgagacagccctgcttttggattgttgtttaaatctctgggaggcccctgcttacccttacatgcaatatcaagctggttgtgtcagcgttgggtgtatatttaatttacatgttcaaaactgctgcttttttcgctttcttcaaactttgtgtgacatttgaatgtcttgaattctaagacttttaagttgctgtcttttttagatttcatggttatgaccagcgcaactcaatggcttccctctcgtcgggtgcatttgtaccctggttttgtttcttcattcgttttggtcatggtagatgtctttttactatttgttcgacagctcaatgcaagcttctagagtcccttactgtctttatatcagtaataatcacgttacatccttgaatcaaaccaaaaaaatccactatcgtcgtgaacacgggagatttggacatggttcggataagtcttgagttttgtctgttgtttttggaatataaaaggtatgtttgtttttttcgagaaattattttttaaattttttttatatttatttgttgttagaaaagttaatcaacaaaaaatatttttcaatcgaagaaaaattcggcttacctaaaaaatttaaacggaaaatacttgctgaaagaaaaaaatttaaaaatatcatattatttgttaattatatcaaatttaaaaatattatattatttgttaattatatcaaatttgataatcaaacttttgattgctatatatattttgttttgaatatttattttttaattttattttttaaaatttaatttttatattaactttgtttttttatttttatttgtttttttcttattatttttttattgaagttttttatgtatcaaatttgatcctcatatttttttgattgttacttattttatttgaaataacttataaaatgttaattattattattattattattttaatttctttatcttttatctttttttattttttagatttgatctctattattttgattattatttattttatttgagataatttatgaaattatatttttttttcaatttcattctcattcaactttttaatttgtaagatttgttcctcattattttaataaacttgaaaaaataaaacattaataaattattttccagctcattttccattacataaccaaacactggaaaatatttttcaatttatttttcattacactaccaaacatcagaaaataattcactttccataaggaaactattttctagcaaacaaacggggtctaaggttctgttttgttcttgattttgaaaaataaaaataaaatatttattaattttaaattaatattttttattgtttttagatattttaatacggtaatattaaaaataatttttaaaaaatattattttaatatatttttaaataaaaatattttctctcgttcagttaggctgcttcaaccaaataaattgcccgggatcataactctgatttctgattgtcacttcaaacaaacgtgagatgaaaaatgatggcactgctagtcggtgatatgaacgtcagcttttgtcatatatattggtaatttagaattcagttagtcgggtgttcagctatctagtttggttgctcgaaagtaacttcaggtttagattcagaacgctaagaagcgtcggcaagggattataggtaggtcgaggtcgaggtcgaggtcgagtggaaaattttgttaaccaaccaaaaatattgaacaatctccagaaaataaatttattttaaccaatagtgtatggatagagaaagatctgaagataatattaaaaaatataagaaaaaagaatataagaaacatggttataaaactcaatctaggtgtcgatctagcctgcatcatgagttgaataggttgacacgcgggtcggcgagtggattaaagttaggattaaaaaaaaaaaactcgcctcggccagactaaactctagatagataaactacttggttgacacgccgggttagccaggcggctgccatggaaggtagaaggatatgataccatgctgaaacatggtgatcacagtagagcaaactattaaactttgtagagacacaaagtcacgtgacagcttgtaaccttcctctaggaggaagaagaagaaacccatataagagtcctcttcatgcatttcgaaatcaagaaagattagcatggctataactcttcccttcactttttagatattaagcaaaaaggaaatctaaatattcttcttctatcattcacacattcctttcttttctttaagatttctttccaacaaagaatggtctttctccttctctcctagccaaagtctagctatctccatcacctcattttttgaatatataagcacattatatatcacacctattaaaacacacagaagcttcattcttcacaatctttctgcatttgaaacacccttttctgttatcatttgttttcctgctcaa

SEQ ID NO: 28 - DNA, 3000 bp, Poplar sp.
gactttcggtatacaatgagatctctgtcttgaaatggatatcaaagaactgcgccatgattttgagtaatttgccgacagtaattgaagaagacagcttgctgttatccaccatcaacaaaatcgagaattttgacaagcctacagagctcgtgtgcacttccggtggtgaggcacgtgctttcttagaagccagtgatctgcagaaagggaaaaatggttctgagctgatgttttctggcaagacaaaaagggtcatagagaggtggaaactagcagttcaatggaggatcagctataagaaaaccctgattgattgtatttcctattgtactgtaactatcaattctctctcaagtcaaaacatcttggccatgagaactaaataatacatgtaattttggataccagaaagatcatttaacgcacttgttaacgttctctccttcattcatcttgttttagccaccacaagtagttttcacctgggaagcatttgcatgagccaccttcatcttttctgctatcaggtttctaccattgttggctgtagaatatgattcttgtactttcattcaagttactagatgtcgacttattcatcatcaggtcaatttaggttttctaattgaacattcaaattctaactttaaccatatcattggttaagtcaagcatcttccatggttaagtcaagtcattttcgatttctatgtaaatttatagctgttttttaaaatattttttatgaacattaaaattattcaaaattatataaaaaaataattcttttctgaatttcttttttcttttaatgttcattcagttggaagatttcttatcaaactgcaatccagagccatgtttatcatatcaagtattcaccttcaactaacagggaaattgatattaagtcgagatttttttattttcttttaattttaaataaatcaggacgatggatcagaatcctggcttggttctcaaaagagaaaaatcgctcagtttattcagcttcgatcatttggggaaataatcatcatctccatcgcttcaattccattaatgtttctccaaactcttatcatttaacactatcaaaagtaaaatttttttatttttttaatttcaaataaatcaggacgatggatcagaatcctggcttggttctcaaaagagaaaaatcgctcagtttattcagcttcgatcatttggggaaataatcatcatctccatctcttcaattccactaatttttctccaaactatatcatttaacattatcaaaagtaaaatttttttataaaaaaaataaataaaaaaaatttagttgaagatggatcagaaatctggcttggatctctcgaaagagaaaaatcgctcagtttgttcaccttcgatcatctggggaaataatcatcacctccatctccgccttactaatttttttttaaaaaatcaaaataaaaaaaaatcataaaacatctccaaatatgcatacaacagagggcatagtgtaaaaatctaatgaactcctaaatgggttttgcagaaacggaaaataacatatagcgtcagctcatacgcaacgcttatgctgtaaaaaccgctggaaaccagtagatgaagcattgaaaaataacttaattgacctaagaaagaaaatattcgaagccgagcaggcaaatcagaagataagaaattggaaagtctacagagacgcttatggtttagaagaatgaggaattggcttgggaagaggggtttataaaggtgaaggaagggagggtttgctgctgtttctaaaaccctagagcaagtgggcttctgccacgtgtactgacgtataggcagaatagagttcgatttcgggctgtttgggctggaccgtgcccaaacccaacaaatgagtggatcttaggagagtttgggtcgtttcgaattagtccccaaacaactcaaattattaattagttttccttttttttttatgcatataattgtaattcatccttttctagaaaatatcaaaatatttttttttattttataaaaaaaaagcaaaaaaaaaataaaaaatatatatatatatatatatatatatatatatatatatatatatatatatatatatatatatatgcttgcaaaaccgaaccttttcttttcctctccgttatcgttttgcttttgctttgtagcaaaatccaaaaaataccaaaccctatttctttccaacataagcaaaaagctagtttcgtgtgcatgcaattgccaaatattaagacttgtggtccaatgtatccattttttgttccctaccactaattttggaatgagtcaagagttacctaactagaaggtctcgagcttgaatatggatccaaaccggaagttagcatggttaagaagctacaacatcatttttctagctttcgaacaagcaacagaaaaatagagagacgtgtcccttgtttcttgttgtttttgtgtcttttgttttgtttgatgataataatcacgcatttgagaaatttgaagttaataaagaagtaaattgtcatttttcttgatctggtgagagatttaatctaaaagaaaaacaaagagttgaggtgaaagtggcagatttgtgctggggccttcacctattctttccctagttcttccttgcgagcacggaaaggaaagaatattgagcattgctttgagtgatagccttttttagtaaccaagaatctcttcgaagctcttaaaattcctttctttttcttttcctcctcttgcacccgcctttaagcatcctttaccctgagaacaaaatctatcagccaatcacttgattacaaccaaagcaaacccattttcatgcaccaatcaaacacgtaccatcgctctataaattggttattctaaacaagagttgatcaaaaacattctgtgaccattttcttaccttcaaaactcgtgttgtggtcaaaaaacagagcgttactacaa

SEQ ID NO: 29 - DNA, 3000 bp, Poplar sp.; identical to SEQ ID NO: 28

SEQ ID NO: 30 - DNA, 3000 bp, Poplar sp.
tagaaactcacttatcaaatgaattgagttatttttttttaaaaacaaaatctttgtggtcgcattagattttataaccatggaaacgaatgaatctttgggggaggagaatttgtttattagaattttgtttaattttaaagtaaatttttaatttttaaatccagatagttaaatgcataaataagtattacatagataaatattggatatgagtattttattattattaacataaaatctagagattatcctgtaaaaacaatttaatttaaattaatttattacctagcaaaaatattcattgtgattaataaaaaaaattgattatctccagtaatgtatcttaatccttgtatttaacacaataatttagatatttaaattaaatttgagtataatttaacgatgagaaaaaaaaaaaaaaactttatacttcaagtaatgtatttccgtccatcatgcgcgggagctggagaagttgaattaatgatcttggcgacgaattaagcatggcaagtattggcaatgttgccgatgcaaagagtgccaaaagcaatattgagaagatcctgatgggcttcaaccccattcaaacccgaagaagttgaggatagttggatatggaggttcaaaatttccaattggatgatgaacatgcacttgatgcaacgaaatctaatggagatcttgctggaatggaatggtgtggcaattctgaacaatttccaccatttgggaaactagagttccttaagcatctttcttggaaagtctgcatcttgattccctgaagagtttagagcaatggacaccagttactgaagacggttttcctagccttggcgaagtctaattgctctacatagtcgaaatgccaccagttatgatctccatcagcacattgaaaatcgtggaaggcagtgctacattattgaggtcagctaggaactacacttctcttatcttccttgaaattaaaatgatttcggattcgatgcttcttaatgatgactggttgccaaaccttgcactccttgagcactcacatggttttgaaaaatctgcagtcccagtcatatcagatgttagacaacctatcttctcttcggaacttgcacctttcagtattctaataaatctgcatctctacctgaggagtgcaatacctgacagcacttgagaaattgtatctggaagcatgtccagagctgatttcgttgccgaagagcatccattatctcacttctctccattatcttattattctggattgcagggccttacgttctctaccaaatgagattggacatctcacctccctttcaccgttgttgatttgggactgtcctaaatcgatgtctctgccagaacaagtacagaatcccagtatgctcagagttgagaataaaggggtgtccatatctgaagaagaggaataaggaagagagaggagaggactggccaaagatagctcacatcctttcactgatatcaacctgcagaaagtaatccaatgatctctgcagacatgaagattagagtggttgactttttggatttcggaatatgacgaggttcactccacattagttacattggaagttcatgatgtaagcctttatgcgattctacatgggaaaaatgctgcaatatggttgccttgttctactttttatgatctatacagatgagatgatacactagttataatttgcagaatcaacgatgataagttgtagtccagatttttataatctatagggattatccatttgatgtttgcaatctacctctgattctctttactgctgcattgggtcagaattggtggatgtatcttccaaaaatatatttccatgttttccaaaaataataatctatatggattggttattccagcacccataagtcagcaaccagagggagttttccaggaggaattggactggaagaaagaggaacaatactataaggaagaagagaagataggtccagaaacaagaggcattctatgcggcagaaacaccatatctttttcaattcatttttatttttattttttacccttccatgtttctcacagcccagtcattttgatctagctcttttaatggtgacaatgcttcatccataatccataatcaaaattcatatgtttatctctcctttttttttttttaagaattaatatacttttcttatcaaataacaaaagcagaagaaaaagggaaaaaccaatatgcttgctaaaaccaaaccttttcattttattttatttttctctcagttaccattgcttttgcttaatttatagcaaaatccccaccaaaaaaaaaaaacagaccaagccccattgtttcccaacattatgtcccaataaattatcacatgttaattgcaattggcaaatgataagacttgtgtctgatgcatccattattccttgttctaattctttatatattttttacatgtttttttttttcatccaagatattaaccaagtataaactaaaaactttaattgacctgtaatcttttaaatattaaaattaaaaacaaaaacaaagaaagaccttggctacctttccttccttccttctctcgtctttctttttctatgaattcttccctgttcctatcttaggaactcgaaaagaaaagaatattgaggattgctttgattagtctcttttataaccaagaatctctatgtaactcttaaaattcccttctttcccttctctttttctttactaagaatgttccttttcctcttctatcacctatcgtccatcgacctattcccttttaaaaaaaaaagagtaagtctcaaagccaatcatttgattacaaccgaagcaaacccattttcatgcacctaccattgctctataaattggttgtcttaaagaggagttgatcaaaaagcctttcgtgatcattttctttccttcaaaacttcgtgttgctacaaaaaataagtgttgttacaaa

SEQ ID NO: 31 - DNA, 3000 bp, Poplar sp.
gtttgtgctcaagcccaccgacaagagcttatccaagatttatataaaacatggcaggatcctgtacgagggacagtgtctggtggcatgatcaagtatgatttacctctcctcttgtacttcctctctttctcttcatgcttgtctttggtgcattaaagttgggattattgttagttgaccattgagtcaacaactaatctgtctctgttccaagaatagtttgtggttagatggtttgaatgtatttttctataatgcagggagcttctcatatccttccgtagggcaaccgggcagaagccacagcgaattatattctacaggtattatcctgttctccctgttttttttttgtgtattgctgccatgtctaatggtgtaattattttccagagatggtgtcagtgaaggacagttttatcaagttttgttgtacgagcttgatgctattcgtaaggtaaagctgcttttcctcgaagctctctaggttttttcttttctatttggtcattatcttgttggattttgtaagccctcttaatttcccatttctctgcttgtcaacctcaggcatgtgcttctttagagcccaattaccagcctcctgtgacatttgttgtggttcagaagcgtcatcacacaaggctgtttgcaaatgatcaccgtgaccgcaatgctgttgacaggagtgggaatatattgcctggtaataaatctggcttggtgatagaattgtgttccaatttgctttagatttgcgtgacatgtttcgctaaacacttcatatggtaggtactgttgtggactcgaagatctgccatcctactgaattcgacttctatttgtgtagtcacgctgggattcaggtaagactcgcatttctgcgcaagattcacatttccttgtgtaaatctgattgctgtagagcacttgatgcttttgatttctcaccaatggccaccaacaacagggcacaagccgtccagctcattaccatgtactttgggatgagaacaagtttactgctgatgggctgcagtccctgacaaacaatctttgctacacgtaagtttatgtcttctttaattttacagtatgatgtgtcttgatagtttattgatttgtttcctttccttacttgtcattctatttttatttttatttttattttagctctaattttggtcttgcaactcttttttttcccttccagatatgcacgatgcacgagatctgtttccattggtaaggacccccccccctccccacacacacacacacagcgcccccatgattcacgtcaatacaatcatggattgtactagactaataacttccactcttgcttgctttatgatgttgcagtgccacctgcatactatgctcatcttgctgcatttcgagctcgtttctacatggagccagagacatcagacagtgaatcaattgcaagtggcatggctggtggtcgtggaggtgctggtgggggtcctcgtccaacacgtggacctggtgctaatgctgctgtgaggcctttacctgccttgaaggagaatgtcaagcgggttatgttctactgctaggatcgttggaaatcccctacttttggatgggcatttaaattttactagttgaaactgttctgttcggaaagcgggggaggccgctctgaagcagaatatcaagctggctatgctctgctttttgtgtcatctggccagttgatatttgcttttaaattgccactgatcctaccgtgatcagaaagctgctttttgctcatgctgtgtgtatggcatcgaatatcattgaatcttaaaactctaaatcctctcgaaactgggatttcatttttcatacatctgatcatcttcctgccacctctatttgtctcggcatggatctggaaattgcagtttggatttagttccaacaagccaaggttccaaatttagtcaaatggtaatcattaacagacgaaagattaaagattttgagaaagctagttggtgatagggaatgtgggctgtcagatacttctggccttcccagtcacaacagttcatggcgtctgctaagccagtattgttgccgagaaatagcacgaggactcttcattatgcagctcgggactggaaaattgtatagaagcagcagagaagtctcaatccttcaagtaattcgaagtcgtttatttaaaaattattgttggtaaatgaatgataattgtaacgagtgatataaaaacaattttaaaattaaactcaaatagaaattttatccttcgatcgaaacaagatttaatcccgttttataatcagctttcgatttagcccaaatcaagatctagaaaataattcaaatcaatttagaaaaatcacatgaagcatgatccaaatctacactatccaatgatgctctctcataggcaaacatccatgcgaaggaataaaatagtatccaaagaaagaagtagcttgcggtcgtagcaaagaacatgagaaatgaaaaaaataattttttaaaaataaaaataatattatattaataaaattttaaataaaaaatagtttgaaaaataactattattattaatttaaacagtaacaagatactgaaacatggagatcacacacaggtcacgtgagaacttgtaaccttcctttgggaaggagaagaaaagcataaaatatacgagtcctctccaatccatgcattttactcactgtatcattcttcccctccacttttaagatattaagcagagaaggcaatctaagcttgcttcctctgtcaatcacacattcctttcttttctttaagatttcttctcctcctcctcccctagccaaagcctttttatctttcttttttttctaagcatttccagctccctatataagtacattgtcgcacaccttttacaaacacacacaggttgctttgtgttttttgaaaaaaaaccccttttctgttatcatttgttgtcctgctgaa

SEQ ID NO: 32 - DNA, 3083 bp, Poplar sp.
aaaaaagggataagctcaaaaccctattacaagcccttccagaaacaattgcaaagagtttgtagctgtagtctttagcaaagcaaaatcaaacaacagtttatcacctcttccttttcttatttccggcagcactgcctttcttggagcctctaaaatcatcagtggtgtcagcagtgttctgcttctttaaacctttcctccctccaaatccaaatttggaatcccttgattccctcttgaattttttcttttctggtccgtttttccccttcttccaaggttgtctccccttccctccagaccgatctcctggagacacccctggcctcttcttgttcgacctttcaaacacttttccatcttcaaagggcatatccaactcaccatccttgtcgcctccagcaaacccactttgtttcctctgtttcctccagttcttaacagtctctatcgctgcctttttctgtgcatttctctctttctgcttctgggcctgaacctctttagctagtttcttagagtctctagctttccttctctcctcagcctcctcaatgcttctcttctctgccaaaagccggcccttcactttctccatatgagtatccgactttgccatctcagcataataatcaggaggcctgagaaaaggaatccccatcgactctagcttagcatatgcctgccttgttccctctaaggcttgtgtgtaaaaagcaagctctctggtcaggtcatcattcacgtccacctcttgctcttgattgaagtcgatcacaagtttgtggatccatccaacattctctggccaactaatgtcttgaagcttgtcagcaagaccatctctattgaatatagcatttttagatggttcaggcaacttcacaccttcatcctccgattctgactcagatccagacaatttttcatcaagattatccatttcatcatctgttatcagctcctcatcagacagggtcaattcttccttgtttaccaccattatacaaacctatcacaatccaaaaccgaattacaattaataagcacaccaatatccactcaagcatgaaaatagcagatattactcatggatatcaatacataaactcaaaattaagctaaaaaaggtaccaaagaataacatagtgacaagttctcctcaatcaaattggattcagatacttctacaaagtaaattggcgctggtatacaaccccggataaagcaaaccaccaaaaaacacaaaactcagattggctcaacaaatcaagattagataatccaatttaaatacttaaccaccaagaaaaacccttaatttatgcaataaaattcgcactaaattgataacaagaccatcaaacaaatacagacagagcctaaaatcaacaaactctaatgacccaattcaaaattcttcaaacccagatgctattttagcataaagtttattacttccaacaaaaacaagctaaaacactacttaaagcgaaaaatcgaagatgcagaaaacggagccattaactatacaaaagcaagctgtttcgatataagaaaaaaaaaggtagcgtgaaagaaactaagcaggttaggtttagagaaaaggagaaaagaaacaatttaccttgttagagagtgagggaagttgagattcgttgagaagaagattatattgtagaaactgcaacctaatagggtagcaagaagaagcatgagtaaaaccctaaaccctaatttgacagggcacacctgggccttagcccaaaccatgtacgatttaatgggcccacgatgagccttacatgtggtcttgaaattttttgtcacgaggtgttgtgttgttttagaaagtagttgatattagggtgattaaattaattaaactatctataatatttataataaccgactcgaaattaattaaaactaaaaggtttattaaattttctatataactttaattataaactaaaaactcattaaatcaaagttcaataaaaaaaaaataacccaacaagatactttttaatttaaattaaatttatttgattttaacaaatttaaaaccaaactgagattaaagtttttatttagttcagtttattttaatttttttaaaaaaaattaaatcttttggtccatccctacttgatattttcatgcctttttctaattataatctttcaatccaaaatattttttatgataaattctatggtataaagcttttatttagcaatgaaatgccgagtttaagcacttttaaccccaaaattattgatttaaagcttttttttttcatgggatggctattgggggatgttaattgtcggcagtaggttacatgtttttaattatattaattgtatttagttgtgttttaaaaatatatttattttaaaaaatattaaattgatattttttttaatatttttttataattttaatatattaataaaaaaaaattttaaaaatatttatttccaagtcaaatcacctttaaaaattattaagcaacgtaattccaaacacgcttactgagatatattatcccaccaaatttatttaaaaactacgtcgttttacttaaaaaaaatttaagactataaacaccctttcttttgcaggacttttgtcggctggaatgccttcccttccaagtgggcagataaaaaacaaggggcgggcgccgcgcccatgatcgcatggatatcatcatgcattactggaccgcccacagtaatatcttcaactttttaccctacgaattttcaaacaaaaaattccccgcatattccccattggatgcaagacccctgccgccgattgggcccactcaaccataaagagccacgtctcacgtgatgatcgagaaaccaatcaaaccatccacatcagatcttgcctcaaatgttcaacggctttgatcttacctcccgtggttttttccccacgttaggactcaataaataaaacctacttacgccctagtttcagcatctctgtgactgtctcaggaaaaagaacagaaaagagaaacctcaggatcatcgaagtgttggaacatcagatcaaca

SEQ ID NO: 33 - DNA, 3109 bp, Poplar sp.
aatacagacaccaaggatacttctaaactacaaaggaaaaggaaggcaaaagagctgatttatgatgctgagaacaaccccttgaacccttatttatattgaattttgacactacaattgaagtcgaattaattaattatcaaaattaattctcaccatcttttaacccttaattacccaccacgaaacaaaataaaaatataactatttaatcatctaaatggtggtccaatgataagagcttggaactaagaggtttgctttctctgtggtctcaggttcgaaccctatggttgttcatatgatggccactggagacttacatggtcgttaacttcagggcccgtgggattagtcgaggtgcatgcaagctgacccggacacctatgttaaactaaaaaaaaatatgactgttttaccttataaataagatgttttcttttaaaaacaaattgctcacttagtgaaatgttaataatcaggcatgttagttatggattggttaaaagataatatttcttcaatttattatctaggaaaagagtggtaaaggtaagaaaaattggaatctaggaagtcaaaaggtcgaaatgtcccttgcaatttcttcaatttcccttttatttaaattatttttcgcagaaagcaagagccatcgtatttcaggcagcagagggagctcatctcaccaaactcttcttgacggttaccaaaccccgccaacagacaaacaagagaaggtcaggtatacttaccccttcatgtttaaaatgatgctttgatgcatagagtttttttcgattagagaataatataaattatattttaaaatatcatttaataatttaaactattaaattaaaataattctttaacatgatattaaaaccttaataaccaaacagtcacgaattcaaatttcagtgcaagttttaaacccaaagagctttcacttaaacgagtatgttagagaataatatatatcatatcctgaaatctcacctaacaccttaaattattgggttgagatgattttttgacaaccacgtgtataaaaaaatatgttataattatatatcatatgtcaaatttaaaaaaatgaaaatataacaccattaattaaaagaactaaataaaataattctaataaaaacttacattaaaggtcaaaattagtttcaattaggcaggaagtacaacaagactaaaaatacttaataaaaacacctactctaaatatagcttaattatcggcatgaaaaaagaaaaaaaaactctgatgtttaaccaaaattcaagcttgaaatgggaaaaattcaaattggattgagacgtaataaattataaatacaagtataatactattaccaactcattaatttttcataaaattactttgagacttaaaaaatgaataaaaacttatcatgtaattgtttgtaaaattgtcattaatgtatagaataaaagagagacaagtagagaaagttattcagcatttaaagtaaataaatcataaatctaaacctagtgctatatttttttttcttattttttatatttgaatttgtctgtattttattaatattatattcattataaataaaattaattttattttttgttaggattattatcaaaccgaattaaggtaaatccatatttgatttatttaataaatagattagcggatctagatcgtataagttaaaaatcaaatccatttaattatatcgtataattcgaatcaagatctagtccattgataaccatagttgccaatggcaataaaagttttacccataaaaaaagtgggataactttatttataataaatataatattaataatgaatataatattaataaaattataatgacctctgtttgaaggtaatatcctaacaaacgtgtgacaacaaattattaataatatgaatataatattatattcattatacatataatattaataatgaatataaaattatttttcgagggatatacttttcattattattaatatgaatataatattcaattgtttgttaggattaatatttaaaagttttcgagggatatacttactaaaatccatgacctctgtttgaagccttgaaggagatcaacaataattgtttttaaatagtttttaattgatttcagtaaacttttggtgattctatttcttttcttgttaaatagttttttccatcagtaaaatatttattttttataaaatataatagagtaattaagattttaagtttttatataatttttattggaattaattagaaaacaatatttctataaaatgggattgtgtcaaaataagaattataggaaagatacttattaaatacaaattatactaacaaattaagggaaaatctagtcgattaataaaacttgtattaaatgggaagcaatattaataatttatggagtgaaaataacatcactccagtataataacaccatataagtgataaaaaacaaaaactcatcaacccataaaacatttatttagggcgattctatgatttattcatagaagcaatcattattaaccaaatcattttttttcttgacatctcgataacctaacaccaaaaaagccaaaataaaccattaaattcaatttcacattatttcaatgtaaaagaattaaataaaaaaaaactatggagcactgttatgttccataatgattttatgtcttatactttagtaaaatcatgagatattttaaatttctcttaataataataattttaagtttgagattctcatttgaaaaaagaattatttttaaagtgtaatttgctttgctttgctttgaaagaagtatggaaaccaaataattaaaaaagaaaaagaaaaggaaacgacgtgatttcttgtagtagaaaagaaataaaccaaatcgtggtgtgtgtttggtactgaggttgagtctcgtgtgtgtacaaatacctgtgtctctctagtgttcactatctcctctcaagtcctaagtagctaaacacttgtctcttgcgcctccccctcaaatctccctctccctctctctttgtccagatccaaaaccttatttaatcaaagct

SEQ ID NO: 34 - DNA, 3000 bp, Poplar sp.
attggttagagactttatttgttctttaattcatgttgcttatcatattaaccctttttttattattctttgttctagcttggtcaacaggacttagagaatgaatttgatatggatattgggccagaaatgagtgttgtttatgttgctagcccaaatcactataatattttagttgttaggataaaaaactctcatccttcatcaagtttgccacattagtaacttattcattgatctataacattacctccaccaatccttaacaatataaagagtaatttgtgtacttctagagctactactacttttgagccttcaagagtaactaggtaatatgttgatgacataataggcaagataagatctttcactaaaccattacattcctaacttagctggtgaagttgagaagatcttccactttaacgaaaatataaagattgattgtttctctatcagaagaatggtgacagaggtgattgaagatgctaaaaagcttaaccatttagactcttcactatgtcctgtgataacatcatagtagcgagccttagaaattgaaaagcttaaagggcagttcgaaaatttcaaagctcttaaagatgatatctctatatcgttttccaccactcatgttgggataaaaaaacacagaggaacaactcatgaagctacaacacaaggaccaagttaaagtcatccctcaaagtgcatgaggaagagctttttaagagaaaagtcacctctggcattaaagtatatatcaccacaatttctactttccttgtacaaagtgaagctgatgcagtcattttttaaaaaaattaagaggactattggagaccaaactaagagagttatatgtacataactagaaaccatgatatgctaatagtttctcatatcttagaaatttttttttcctatcatttcttttcctttggaatgctttttagttttggtaaaacaaccccttaggtcaaaaatccctcaacaaaaaagtaactaaccaaacaaagtctacgtacctgactcaaaacaaaattaatcgggttgacttgaaaacactagttcaaccttgaactaaatcgaaaatcatggtttaacccgaaacctttgatttgaccataaaccaaaccaaagaccactggtttgactcaaaaaataaaccaaaacttaaaccagaaaccaaaacgaatcaaacttgaaaaaaatacaaaaactcaaaaattatttgtcaaaacgaatcaaaacccataaaaaataaagaatacgaagaacaccaatgaacatttaaacaaaacccaaaaacacaaatttcaatggaggtggtgttgccttttaatcatgtcagaaaaagtagatgagggattgtaaagtttttttttatttgatttgatttttattttttagagtgatcagatgatattttgaggtttaaaattagtttattaagatcctaaggatgcttttgggggtgtttttaagtaaaatcaagttgaaagctaggattttgttgtccaagttaaaattgtaatagcggacaacacgttatttgcataaatagacgacgtgtcgtgcacactatttaaagaaaaaatatttggtattgtctgtcattttgtgtgttgtttttttttaaaaaaaaaaagagagagagaaccaaactcatgggcatgccctttcaaacatgggcacgctagggcttttttccttttaagccaagcgtactagcctagccttctaagcttagcaaatccaggcatttatctttaattttaatttgttattttaacttaattttatattaatatcttctttctcatgtttttttaattgtttaatttgaatactatctacatattaattagtcttttaaaaggtttttataattttataacacctcaaagagattatagtaatttatatttaaatttttttttcctttttaaattttagataaattagttttatatgcattctgcatttatatgaaatataatcatttctacttagcaaccaaactaaacctttaagataaatacatgaaaaatatataaaataaaaagtgtaaaatatttgtatttttataattcttagctttttgctttgaaagtcaacttttcattttagttttttaattaactttcacactttttttttcttctgatttatcaattaatatatttttaattaattataataaacaaatacattatttttttcattcctcagttaacaaatatttttataccagaaaccacatgtacgaagccggtattttcttccctgtattaaagattatcctcaatcctactctcatacattaactagtaatcacaaatgatttttaggaggaaaataaaaactcagcccggaccggcccatcacggcctggaccggcccatcacggcccggaccggcccatttaagtaattacctgcccatataaaaacgagcctcccaaaacaaaacctagtacattggatggacgggcccatatccaaaatgacaaataattcacgcatgatgggtgggaccctgtatttcttaataagaaaaacaaaagaaaaaacacaggcacccacctaacctcctttttctttttttctttttttactgtggttgactttttgttagttttatgcttttgtttgggattaattttttttaaaaatatatttttttatttaaaaatatatttttttataattatttttatttttaatgttaacatattaaaattatttaaaaatattaaaataataatttgattgttgacacattttatcttgctcttgccccttgagcttccaagtgaatatccaacaaccatactaatacattgtattttattaaaaacaaattgaattatattttaaaaaaaactaaattattttttttaaatgaatatataaaaaaataaaaaatattattttaatatatatttaaagaaaaaatatattttaaaaaataatttatacagcaatacaaaat

SEQ ID NO: 35 - DNA, 3000 bp, Poplar sp.
tccaatccagattctccgtgtagggcagctagtcatcctcagtgcacctggaggtacctttcattgcttctttcctttgttttcctataaggtaaatgctttcattagcagtatcatgttttatgatcaaactaagctctgaagttgaattgatgagaaactgctgatattttatagccatagattatagaacatgctaagatcataccttttgtcttttaccaaatgatggtgatgagcacgctgctaaggttgttactcaggctgggatggaggatgtgctgtcaacctgagtacggtccaactttttgtcattaaatagtctggtccggctcaaatgaacttatttgtgtaaatggacatgttgcatggtgggttgaacttccattatgcaaaaaatacccctggaatacataactaaattttgcttcaggctagtccagcttcatgttgtgttgggaccagcgccaagcaggcaaacttcatactgcagcctgtgccaaatcttttgttccccactttcattgcatttcaatcactgtaccttttgttcctaagaaaactattgtggcattaaacatgctaggagtcattctttctttgttttgatttggagtgctatttaactggttgatgataactttttgttgaatttactttccaagcacctttgtgcattgtttccttgattaaatgcttcaacctatgattttatgagctcaagaattttcttcttgattatttcaaacagaatttacaaccatggctgggaggcgtcttagagatgctgtcaagacagtgctcatgagtggtgggaataaaaaatttaacagtaatgttcacgttgttatagcaggattgactaacacctattcacagtacgtgactaccattgaagagtacgaaatgcagagatatgaggtaagtgaatagtttaatgacagatgcatgaataatttaatcacacagtacatgaatagttttctttcttaggaaaaagttcactgtgatatgtagttttggcgttaagagaactatatactagccagcttgacacgcacgggcagttggttcattagcaaaaataggttgccatctggttctaaattggaagctgtccgaggctttcaagcaccatccttatgattggagttgaatgatctcagcacccattattccataccaaatcactatgaattatcaaagggaaacctgcaagattaaatcgactgtcatgggctttgttttaggaattctgtgatgttttattttttacctttataatcgcttggtcatgatatgaatcaaaaaataaatttttattggtttacctcctattttttatgaagagaatgaatcttcttatcgaaggatcagaagaaaaggggtttgaatttcctgcgggaatgattttgaatgtggttaatatcatgaagaataaagagatagtctatacccaaataaaaatagatgttctcataaggaagccatcgaaggctttccatccttgcatttatctgtataattttatattgtgctttacaattcctaatttcttttttttggtaaacaaatagagaatatttatttagattatggcttctaaacgatattgttctcagggtgcctccacgctctttgggccacacactctcagtgcctacattcaggagttcaagaagcttgcagctgctcttaccagtggccagtcggtcgagcccggtccacaaccccctgatcttctggataaacaaataagcttacttacaccagttgtaatggatgcaaccccacctggtgtccatttcggtgattgcagctctgatgtacccctgaactccactttcaaaagaggagatacagtcaaagtagttttctggtcagcttgcccaaggaatgacctgatgacagaaggcaccttttcccttgtggagatcctccaaggaaaggacaactggttcccagcatatgacgatgatgatttctgccttcgcttcaagtggtcgagaccttcaaaactgagtactcgtagtcatgcaaccatggaatggaggatcccgcagtctgccaaccctggtgtctatagaatgaaacattttggagctgcaaagagccttttaggctctattcgccatttcaccggttcatcaagtgcttttgttgtgacatgaaaaacataccgtgcatgtacatttacctactttacttgtgtgcttgtattcattttttttatgtataatacttgcacgacagatagctagcatgtgcagctcctgctgaacttttgaattcctgtttttgtaatgcctggagaaaaagacatggtttaccactactcctttcttaagctggtgaccaggtaaatttattattttgttcatgctgcaatcaccactcatcctctggctttaaataaataaataaataaaaataaccatggatcgaattaaaatattttaatttgaaaatatgactattaaaacctacaaatatgatagtttatttgttgttattttggaataaaaaatccacttcaaaattctctctaaaatggatttatttatgtcttttttttaataaatataaactagagggaaaagaaatcgttgtatatttgttattattgagtgcaggtcgttcatcaactatgaataaaccatttatcagtaacttactaagtaggaggcaagtcgttccatgagaagaaagccttgacagatctttgcactaaccgacacgtcgtttcgtaatttccgtttcgaatctcggaaagtagagtggaaaagaagaacccaaagtagctactgtgttgagttacataatactctattaccagagtgaagaatcaatcatccctaattactagattctcttggaaattgaattacagatttcttctaattttccaatctcagctgctgtgcaggaaggctccaatctctctctctagttgtacactacaggagttgagaaagcaaaaagaagaatcgaggaggagaa

SEQ ID NO: 36 - DNA, 3095 bp, Poplar sp.
aaggaggaacctgtacttagaaatatttctaaaaggcggagaggacgggtccatatcgtcgtatatattttaaaaaaattctaatgggcagaggaaacggatccatgtcgatgcctatatttagaaaaatttctaattggaggagggaaacccaatgagaaaacctctgttgacgcccatacttggaaaaacttataagggtaaaggggatggacccatgttgatgcctgtacttataaaaatttctaaggggcgaagggaaacccaatgagggtaatgctatttcactagggagacttttggtccatcccttggagagtgactcagaggaacccatattgacactcgtacttggaggaatttataaagggtagaggtgacagatccatgtttacgcccataattagaaaaaattttaatgggtggaggagatataagggaaacccaaaaagggtaatgctattgcaccgaggagacctttggtctatctattggagaatggttaggggaacccgtgtcgactctcatacttagaaaaaattctaaggggtggaggtaaacctaaagaaggtgatgctattgcactggggagacctctagtccatctcttagagagtggcttaggggaaccaatatcgacacctatacttggtaaaatctctaagtgatggagaggacaaactcatatttactcccatacttagaaaaatttataagggttagaggggatagacttatagagatttgtgcaatcgtactatggagattttggatacatctattccattgagagttatgcaatcacactagagaggcttcagatccatctattttaaagagagttatgttattgtactaggaaggtttcagatccatcccttttaaaaagagttatgctattgcactagggaggttttagattcatcccttccaagaaaagttgtgcaatcacactatggtggttaaattaatctctttcaaggtaaattgtgcaatcgcactaggaagaccatggtgactcatttcgagataaattgtataatcgcactaagaagactaagtcaatcccatcctcggaaggttgtggggctattgcccaagtcgatccctttctactatttatttaagagttgctaagttttgatggagcagatgtgccaacaattatagggaggtccgtgacatgtcccattttagaagtgtcttgattatctgtttttgatggtgattaaagatgtcaataaaccacttttggaagagcaatcaatgattttttttatatcaagtttccacaaacgacgtcaattgatgaagagagtgtttgggaatgcagtgcaaacggcgttcctaaaaattttgaaattgttttttgcttaaaataattttttttatattttcagatcgttttgatgtgctgatgtcaaaaataattttaaaaaataaaaaaacttcattttgatgcatctctaagtgaaaagcactttaaacagtcaccgttaccacaatcccaaacatgcccaaagttctaaaaaatcaaagtagcttaagaacaaagcttatatgttggataatcggttaatctcctggttctaacaatatgatcaattctccctggtcaatgtggctgttgcttaatatttgcaaaatatcacctttgatagatttgaggactctcaaatgttttaataggtatctttttagagagtgaaatgatattttagatagagatgctatgaaaatatacatgcaaaaaaaaaaatagagatggtaaaccctttacctaagtggtttaataaagaataaatagtcttgaaccttgtcatgttgcttgaatggaggggttgaaatgttattttcttctcataacattaatgaaagataaataccccatatacaacattaatgttgatgaaaatatggtaggtcttaaataactttatacacccaagggtgtgggagaatatgatttaaattgtattgggtcagtaaaaagatcctttatgataaataaagaatttttagatgctaagcttttctacagggttgaacccgttatggctaaactcttcgctaaaactaattctattggggttgaactcttttctaaggttaagctaatgatgttgatattttttttttttttaactgagttcatgagggctgaactcttcttcaagacagagcccatgagggcttgggcttgtcccaaacatgttgccttagcccgtgtatctttgggcattcgagagggttttttaagactattaaattttaatttatcagttataaaagttataaaaaccgaagcaccatgattgatgttttgcatttgctggagttgattctaaatagttggcagatccactgtcgtcaccatcagaatggagtgcaaattcaatgtcttttatatatataaaaacttgttgggcatgcaaatccaatggatagaactcagaatgccaggattcaattgcttgcatgagatggtgctaccattggattggctttaatttagttccatttgttttgcaacattttttattctaatatcagacaacaaaatttgggcattcatggtaaaatgggtttaattttcctcctcctccttttttttttctttctaagtaatattttgaaaatgcaccaaaaataaaaagacagcgcattggtcccctaaatatggaccggaaaaagccacttacaggtcacagccgaacaggcccaggtaaggtccactcacgtccaggctgatccacccttcctgccttcctcccttccttccaattgaatcaaagtctagcctcgagcggcaagatttgaaaatataattgaaagggacgtaaaacctaactatagttaatacataaacaatgaaaatacaccacgtcagcaatcattgccgtatgttgccctttcttaaccaaccccggttaaaaaatccccaaatgtctgtcctataaataaccatcacccaagtccatctcctgcaaaatcttccccagaaggcgtcttgataaacgctttcgttccaaatctccttctttcttccatcggatctacttttgttgttttctttcgtctcttaatcagcgaaa

SEQ ID NO: 37 - DNA, 3000 bp, Poplar sp.
cattccacggagatatctgaaatcgttctctttatagtttttgatgtccgccatggcgttgacaggaatcggcatcgcttcctccgccaatttctacatcattggctaaggacaaagaccgcaaattccattcttgcagtgcctgtgctgtgctgcaaagcaaccccaaaaccctcaacctcaactctcctgggaggcgtgcgaagcatggtggaagagtcacaaagaagatctgtcaacaacggcaaaactagtccatccttcaatatcttaaaaactcgacgacttctttttcagagcgtgatctgcatgcactatcattctcaatatcttgcttctcaggatacatacagaatcctgatcaaatgcacaggcacagccatgtcaatcactgtcacccacacctgaaaaaagagaccttctgataattcactcccaggcacagccatgtcaatcactgaaactcacaccaaaaacgcatcctgaaactcattctgcattttcactcttctaattacctaattctcttctccttcctctatcttctagaagcttgtccgataaagattatgatcctcgaaattggagccgttcgatcaactctgaattcgatgacgataacgacgacgaacaggggggggggataggagtttggatctgttgcttaagtttgtttcaaatgtgttcaagaaggtatcgaaacgtgctacaaaggccgtccgatcggttttggccgttcctttatccactaaactggtaattattgtgaattggttctcattgaattaatttgatgaaaatgatggcgaattgtttttcttttcggattaatttcgtaggtggagttttcggtgaatggagttttattgctggcgtttttgtgggttctgaaagcttttctcgaggcaatacttggtatgttatacttgattttcttttttactttatacatttcattcaaagctctgagtagaatgattcaattgtttgttatgctacttcagtgtgcatgtcttttgcagttctgtaagtcctgggtctgttcgttcccaaaatcatcgaaaatgtagaaaaatgtccatttatcttttatacagtgcacagtgtctgtgcacttgtacatccagaggaggggatttctctcactctatggcattggatgttagctgttctatgcccttctggcatagtagttgctcatgctggtggaacttcttgaaccaagcttgggtttctacactttgaaatgtgaaggactcaacagttgtaaccactgttgttgaaccatgctttaaaattaggtcattaatgcttagcaagtccggccttgagttcatgtgcatgaaaatattgctgtaagccaactgtgtcataatatactttactagatacagccgtagtgatttgtgagccttacggacatttatttctatgtcctcgtagtgtatgattgctgctcccttgctttcctcacaaaacactcggtagtctctgaaaacatgaccatacttgttggaatcaacggcttgagatttgtaaaattcgagatggattattgcctggatatatagttgtgatattatgccgctcatctctctgtgttggtgtttgaaatgcaggtggttttgcacccttggaagtgtggtgcttgcaagcatcttacttatacgtgggatgtggtctgaggtaatctcaggaaggatgaactcgatgacccccgtgtatggactggcacgcagcctgcagcttgatttttcattcttagagctgtaaatgtacttgtatttatgacattcttcaagaataaaagcatcctcgtaatcgaacttcccaaatcaaggatgatgaaaagatttcatctgaaggtttcacacgtcaaaattgctgcattggaaataatctgctcatgtgagaaagggttccccgcataaagatccagatcagtgaatccttgtagaaactggaggagatcaaattgaacgtacgggggcaatttccccttgtatatcttcaatagatagacactagccatgtactcattaatatgaatgataaaagattgtagttatagagcttttatccttcaacaatttaggcgcaaccgttgagctcgttgggtattttaggtgcttcttcagggttgcggtgtaacttgttttaggattttttttaaaaaaatttatatatattttagattattttgatgtaatgatgttataaataatttttaaaaaataaaaaaaataatttttaaaaaatatttattaaaataatattttaatatatttataaacaaaaatattttaaaaaataactgaatatagactcgcaaaccctatgcacaatgaagtaaaagctcaatgtttttatttttatttactatttttttagcatacaaatccaatggttagaacctataatgtcaggattcaattgaacatttaagaaaatagtttcccgagatgatgccagtataggattcgctgcatctgtttggcaatattttttgtcagacagctaaatttgggcataaatggtaacatgattgtttttcctttattttattttttttaaatgcacctaaaattaaaaagacagccattgggaaaggccaccactaactaccaaacaggcccaggtaaggttcacgtgtccaggtccaccctatccaccttccttccaattgaatcgaaggacttattagctggccacgagcggcaaaaattttaaaaacaattgaaaagacagaaaacctaactttggttaataagactcaataacaaccgaccacgtcatcgctgatggccgtttgttgccctatcttaaccaaccccggttaaaaatccccaaatatctctgatataaatcaccacccaaatccccctgtcatttccatctcttacagagtgatctctagaaggcgtcttcataaacgtcttcgttcctaatctccttcttcaacaatcagatctatctttgttgtttctttaatcagcgaaa

SEQ ID NO: 38 - DNA, 3122 bp, Poplar sp.
attttgttcttcatttagaaaattagtggttaatattttctaatttgttatagaaagatgggatttagagaaaaagggacagagtaaaataaaaataaaaatagagtaactaagtggctatataaaaattggcatgaaaaattattatagtttacatattgttctatggaaacattttcaatccttttagttttttaaaatttaacttttggttcaaaattttattttgcttattttttagtctctagatttaagagatgagagatacttactcgtattaattgaggagaaaagaaatgccggtttgtgttgattccaaccattaaaataatctattttgatgtcaataagttcattttaaataagaggagttccaataagacgtcacttagccttcatcttcactaagatggtagatttgggctcatgaagtgtttttgaatatgtgttgattcttgtttttaaaactaatttgtttttaatttgagcctatatatgagtttatttaagtttttaagatgtttattatgtgtttttgagtaaaaataattcaataatatgtttttcagataaaaatattattggtctgactttttaaccacttgaggttaggtgtagttgaattagaggcttaaatattgtttttggattaaaacaattcaagttgaatttttaattaaatcgcacatgctgattcaattgaaattacattaagagtcatcatacggtaaatctggtgttagtttggtgttatagtgcaaattactttttaattaaaagatagcaatgcttccagcatggtgggctcgtttttcaaatcgaaagctgcttcttcttctttctttgttttttttttttaatcttgtttttctaatttcataaaaaccaatcattatttcgcaggtcaggtagttaaatttgtttggctaattgatccagaaacctccggaaagtcaaactcaaataaactgctgacctttttatttatttttattttttgaattctaattcgtcggactatctggtcaagataatccacctctcatgcgaatacttcttagagtgccatccattataccctgttaagttgccggtggttgcacatgtttgaccaccctccctcccctaattttcacggtggaaaggggcttgtttgggcttgtttgaaattataataatagtgattatttaaagtgttttttatttaaaaatatattaaaataattgtttttattttttaaaaattatttttaacatgaaaacaacatgaaaacataaaaaaaattgttttcatcctttttaaaaatatttttttttctattttttctattttttttcaatattattatatagttttcttatttttatttttctatagtattattaggtttttctgtttttttttttaatttaaaggaaataattttttttatattcaatattattagaaatttctaattttttctatataaaggattttaaaattgtaataacattttgacaagaaatttaatgaataaaaattaaatattctagatatctcttcacagttatgacattcttggttttaatttataataaatcgcattatcattaaccctcggctaaattatctatttatttatgaccatggaaacacaagtgcgtgtgtatttggggaggtgtgggtttaaagcctgcaatataattgaagaaaaaatttaagaatttttccgcgttgatgaaaccctgattgaaggttggagcatgcctcaataggcagacgggcgaaacttagaaaccaggaataaacgtgaaacacgggattcacacgaatttggaaatccacgcttgtaaagaaaaccaaaccgcataattttatttcctatttgttttcgcgtcttgtttttaaaaaatttaaattttattttatttttttttctttaaattaatatttttttgataattttagatcattttaatatgctgatatcaaaaataaattttaaaaaataaaaaaaatatattattttaatatatttctaaataaaaaacacttcaaaaaacaattataaccatattttcaaacaagtactattaaaaaagtgatggacaagagaaatcaaggggtcgcggatgcgcttaagctatagtgaatgacaactagtctaaagttaaaacttagacctcctcgcgtaaattttatatttatatttttaatattaatacattaaaataattaaaaaataatttaaaaatcattaattcatacaaaatttttaaagcatattaaaaagagaataaacggcaaaaacaaacctacgctaattgtgaaataaaagattaatctatgcacacggtatcgttttacttcactggtcggtgtaataatttctctaaccttatgacccaacaattcactattttgaaacccttgttgttatttttttatcaacctttttcttaatctccatttcactcattccagttgcctggacagtggacatggtggcggtgcctcttgatcttttctagttgggccacatgaatacacttcaagggatttgaaactaggcctaatcgattgaaacgtagaatccactctctaattgagaggacggcccaccctcctgggcgacgtgccctctcatccaccaggaccaccaccatcatgccttctctgctccttcctcacgcctcccaacagaatgacattattaccctccatcccaactatagaccggcagtggcacaactgcaatttcctacaacccaagacgatccccaaaactaaattcaaaaatcaaaatggagcgggcaactaaccatggttaaaataacgattcggccaacctggcaaaatcaagaattaggtggcttgggaaacggcatcattggcatgcacctaatttgacccgtggttaaactaaccctggttagctaaaccacacactccctccgtcccctaatttctctccctctgaaagtatataaaccccatactcacagacctaaaaagctcacccctgaaatttcataggcgtcttgataaacgccaccctccctcagcatcaattccaattgtctttgctttcgattttctcttcttttaatatctgttgatctttgtgctttgagagaaa

SEQ ID NO: 39 - DNA, 3000 bp, Poplar sp.
acaaatcagtatttcaaatcccacattttaaattaccaaaaaaaagaagaatacccttaaattttgaaaaaaattaaaaattatacttagcaatatacccaaatgttttcaaagtatttcaacttttttttttatagtaaaaaatattcttgaattaatttatatatcaataaatttaaattataaatacacttctatttttgttaaaaaaacatttggagattctaaacctaatttaaagactgtgttggcctaatgcagcaattattatataagattgatgttgtttggtattgcgttttaaaggggaattgagtaaattaaaaaaaaaatttgtttaaaattatatttttctatgtttttgaattgttttgatgtattgatattaaaaataatttttaaaaattaaaaaatatattattttaatatatttttaaataaaaaaatactttaaaaaataattttaataatttgacgtaataagaaatgacttgtgtctgattgatgcttagcagacaataatagcattgggagaagctgaatctgctatatatatattggattaaattggcaatcaggtggtctccagaaggtgatctcgaaaacagattttttggtgcatctttttctccaatgccccctagaatctagttaagcttgttgaattttggtgagctgacggttaaaatattgaaacccacaatttcaattttatattttcacaaaaaaataatccttgaaatattataaacacaatctaagcacaaaaaaatcatttataaacaataaattaacgcatgaatcaaattagttgttttagatctaaaaattaaaattaacatctctccctattttagggatgaaatagttcaattttgatatttataaattcgttatgatgagagctatcatttgctgatgttatagcctaattcctttaacaaaaatttctttctcctttctctgttatttttatttattttttattttttatgattttaaaattttaacgtttttatttaatccaaaaaaacacatggattaaccggcctagctttttttaaggttataaaatctggataacctcattaaaaagaaacaaaaaaatcataaagctgatttttaaaaataaacaacattggaagataaaattaaaaaaaataagtaaaaaaaaataccccttcaaggaggcatcacaacgtttggttgttgaacggtgctttcatgcaccacccgaaagacgcaggctttctcacctactagcacgtttgttacacgcactaatcatttttatttatatattatattttaaattaattaaaatacataattacctcttagtcaaatctattataacaaaaaacctaaatgaaaacacgaaaacgctttaaaacgccagttaaggaaattttgcttttaaaagtaagctaattattttattctactttttgggggggggtaaacttgggctaatcttccaaacccacagctcgtgaaatcctaaatctaggttcaataaagaaacttaatttcataccaatttaatattgaatgatgaaatcgaaaaataaaaccatattaatctaaaagttctattaaagtaaaacaaaaatagcaattaaaataataaaaatcaaatttaataggaaaaaaaattaaggatgaaatcgtaaaaaaaaattcattcttaaaaattaccttaaataaaataaataacaatcaaaagaataagaaaaaaatatgacagatgaaaaaaattaaaagaggatgaaattgaaaaataatttcaattttataaattattttaaataaaaaatactaataaaaagaatagaaatcaaatttgaaaaaaaaacaaattgaatagctgttttgaaaatttagaaggtcaatgtgatatttaaggtggagagagaaaagaagaagaagaaaaaaaggccatgaacaccaaatcaaagatgttatatcacacgcattgtcgaggaatggaggggccacctaaaacaaccagacgatcgtgaggtctcccaacatgccaacatttttttttaataatacttcatatttattaaaatacataatttcccctaagtcaaattgattataataaaaaaacaaaaaaagtttttgtatgctaatttacttttgtttttggcatttaaaagtaattgtgtcattttacatgttaaaaataaaaaaaagtgtcatattaccatgttaaaaatataaaaatactaaaaagactatgtattaaaggtataattctttttttatttttaaatggaatttcgtaattatactatgctataaaatatgaaaagaataaaaaaaatccttcgatgaaatctattatatatatatatatattgtttttaagagtattttattatgctaataaaatattaacaaatttatttgtcattaattaatatgataatatctaatatatcatttgaaaaaaatcataatactctctgtaacaagcttgttgggtttttacaaaaatagcgaaagaatcattcgtgaagtgtaaaactctatgacttttagatttttaaaaaataaataaattaaatgggctatatgagatgtccccagcactattgtagccctggtcctatctggtggaccgccagcttgagttgcaataaaagaccatgttaattctacgagcccataacaccagtccaaatacagccatgtctattaaacactgatccgcccattttactccatagttattgggcgccttccagaaattcaaatttcaaatttattctcaacggttactgccagctggatcccagcagcagcagcaaccatttcaaatttcaaaaacacccatcttcttcttaaaagccgtttcaaacggccctttctcttcgtatatatatattcttaatttccgaaccctaaatcacaattctctttgctctgtttagcacttagcagttggccgaatcttgtttaatacaatttctctatttcccacaaccaaaa

SEQ ID NO: 40 - DNA, 3131 bp, Poplar sp.
ttctggaatttgataaattattgaacacatatcacaggcatcctactctgtcaagtgacattaggaatcttggttgtcttccatgtgtttgtgcgtttgtctaagtaaattcttgttttacctgttacttctggttgaggtcttatttctattatcagagccggcaagagccccgtaaccacttgaaaaatagttcaagatattcacttaatactaacaaaataaaaattgtccaagactcacatgtcaccatgcataaaaaaaaaaaattaaatattttaaaatacctcattaataaatttacccaagaccccattcaccttaaatcaagtctgcatcgtatatatatcaaattgatggtaactaattgcatgcaaaagcttaatgaaaaggcaatacatctagggtggtctgccatcacttgacagcgaaaaaggaaagaagctctcgtttattaattttactaccagagagatatgtagaggaggggacaaataaaatgaactgtccatgttctgtcattttcctcgtctactacaaacttggacacacagggttgttgtaatgccagcaaattcttgggacttagatgccctgtcgctcttccatttctgattgtgatcaattcccatctgcagatttaaacaactgcagatttaaacatatagtatactctttgttcttgggattttgtcgttcctgatatgaatgggaggggagaagaacaaccttttctctttacactcatcagattcattgaaagagatgtaggcagaagggtgtttttccttgtaatttagccggcatgttgttttgctacttgtaactatatgtgttacatctttaataaaagcagctctgttggtccaacccccagcaagaaaccaaatctagctcttgatttcgaagcttcatctccagatttgcaggtgaccatgatcatgatcatggctgctgcattaaccttgtgagataatgtggttgctgttatcatcagctgatgatgtatccctttaatttctcacttattctatcacctaattactcgtaaaggaatcaagattaggggtatggtagtttggataattaacatacatcacagacttacattgttcttactgaaactttctattgaaatattaattacaaaaaaactaataaccaagagtataagattttgaggttaggctggttaataaattgatttattatattttatattcaaatttaaaagttaaaagggattagaaatacaagatttcattagtatcctgatatgaacgatatatttggtattgtttgattattgtcttaatattacgaagattgtgaatataaaaaatatataattttatatactttttattttgagagtataaaaattcacttaaaagttattataaaaacaaatttattttatatttttatattttatatttatcatatgatactaacaaaatacaaaaatcaattatgaaaaatctatttttatcgtaaaaaaaaaagtcggaaaataccggaaacattaaaaccgaaaaacaaaattataagattcaaaaaatgcaattagaaatctagcaactttctttcgattgtgagatgttggataccacacaacaactcttgtagtagaagattcaaagattaaaatacaagataaatcattgtggagtaagatacagaagaggaaaaccataaaaaaacctaaaagcaaacagaagcaacaaacaagatcatatgaacagcaagtgaaacaaaagctcatgatctcttgaaatgaacaccgcacccacctcccaaacggtcctccatttttctcccatgcccaatattaccctaagaaacttcccttatctcccatttttgtcccttaatcccaacaaaattctaggtcagatgggccgtcatgggtaggccggcaaggtcggagtgggtcccgagtaaggctggcgccaaatggcatggccccctttttttctttctttaatcggatttcaaatattttatcaaatttcatttgtttctacttcaagtcatcttgcccgattcaaaaataaaataacaaaaaaggaaagtggaagaaatatattttggtactatgaattaaaagtattttcactttcatcccatttaaattctccgacattaactttagcttctaaaaaagtctacttcagtccctaaccattaaataatagttaatggaaaccagaggaatatccattatttccttatattcctttcattttttcaagttttctttctaaatttctttttatgtatcagaatatcttattttgacctgaaaaaataatattgattcttatgatggatttttagtaaagatataatttttttaattttagtgattatttaaaaatagtgtttttaacacattgtcatgtttattaaaactaaatcattaaattcaagttgaattatcatgatttaacacataataaaaataaaaacaatttaacttttatcatttgacatctctcgtctaatcttaaatcttgtaatcaaaatcaattattattcatgttttcataaaaatataatcagattcaaataggacaaataaatgttataaatacagaagaacataaatatatttggttaggaaaacaaaaatataaaataaatttatatataagatatttttattatttcaaaacatgatgaacagattgtttcaatagtttttttgttttataacaatgtatgatgaagaataaaatatttttaaatttataatgattaaaagtataatttaaataattttaaagtaaatttttattattttgaaatataaaaaaagaccatcttaatcatttatgcgaacagtaattaaacgacatctaatggactaattaaaattttaaacaattaaaaacggaatgaaatgtttcggaatctatagggatcgaagtatagtttacccaaaaaagcaactctgcatagagatactaacctaataaaaatcttttttcatcatttgcagcctgcctttcatttttttcgatctataacagcaacgtcgaagaaacaaagagaaagagagagcgtttttgtgtgtctgaacagagagaaagaaagaaaatttgagtgtttagagtgaaggaaagaag

SEQ ID NO: 41 - DNA, 3021 bp, Poplar sp.
ttttttcatgcaaaattgagtaccaactcaatatcagaattttttttatataatgtaaaaacttgatagaaaacaattcaaaataaattactaagttaaatcacaaaccaacataattgtgcttttaaaaaaaatttaatttttttctttaaattaagtgcttttttatgttttttaatcgttttgatgtgttgatgtcagaaataaattttaaaaaataaaagtatctccgaggagaaatgttattttgaatagctaaattgataaaatagcattttgaatagtataaatatgtcttttttttaccatggatactctaataagaaaaagctatttgaaaagctaattgtattagagtaggagaaataaacattttattttttttaatgagtttgatgttattttttttctacgtgactatatttaattggtttattttattgttggctccactttattggttttagcttttttgagagatatgtaggaataacatttgttgaagagaaaagacattttgacattttgtttagcactcggaatatataaaataagcatgaaagagccaaaataatatatatatttttttaatttttggcttttcatttagcacatcttttggagttgttttaaaaattattattttgatgtattttttaaaaataatttttatcattattttaaataaacccgaacacatgttttaaccatccatcagtaagtatgatggccccaaaataatatatatataaattacttggcaaatggcacaacatatatatatatatatatatatatatatatatatatatatatatatatatatatatatatatataatagaaaaatgtaagtggattagttcaattattgattgaagtgtgtcttaactttgacatgttagaataaagcaaagaaatgaaaacgtgtgtgttatctatttaagagaagaggttcaatggataaagtaaaataatttacgtaaggtattgtttgctttttgtattttaaaaatgttttttttttaaattgaatgttttttattgttttcttattttaaattaattattttttaatgttttcatattattttaatatcctgatgttaaaaataatttttttaaataaaaaatattattttaatatatttttaagtaaaaaacactttaaaaacaattattatcatacttttaaacatcaaatacaaaactagtcatctctatttttgaaatatttttgaaatttttatcgtgtagtttaaagttgaaaccttgtaataacaaaaaaataaaaaattcatagttttaattgcttaattgttcctagggagataacaagcccacaaattgctttaataatatggattattttttcaattaacatagtaaattaaaaatattatgacaatataattgaaaataataataaaataaatgtgtttatacatgttataattaacaaacatgatatgtataatttatcactatttaaaatagcaacatttaataaaaaatattaaatgagtaaaagaaagaagagatgagagaagagaaagaaaaaaagaaaaagaccttcaagatataccgaatttctgattacaatatcatcaaaaaaatctcaacgagacaaatcgaatgacaccaaaaaagattaccaacaatgatttgagtgggtcacacttaccgtccaaaggtgagaggtgactctgttgtctttagcgggaaatgtgacccactcaaatcatcgttgatgaacttttttggtgtcgatgaatttgtctcgtcaaaatctttttgagagtaccgatgatattataatcgaagctttaatgtgtcttcataatctttttatttatttttttttatctctcaaacttatttaatagcaacaagttataaacatcatttttttttaaactataacatgtataaaatgtgctatttttttttatttgttcaccaataataaaaaaaaaaaaagtgctaatagccaataatagtgtctgaattaatgcatcaataaagttatacgaccttaaacgtactccattaaatttatccttcgattttcttcatacactttggtgttattctcctggatatttgcacaaattcaccttgtgtgaaatcaagcacattaaagatttaaatcggattgcttgaattattgataagttgcatacatagccagatgaactgaaattttggagctttttaaaagtctgccacctttcaaatgataaaaatatgcacgtgttgtatttttttgcatataagtttttttatataaaaaaaaaaacagttttatttttttaattaaaaaaattatttattcttttgtaaaattaaaaaataatcaagagaaaaaaaacttatctagactgggattcttaattgcaagtgtttcttatcgagtaggatttgattgtttttttttaatttattttaaaaacgttggttaaatagaaaatctatttaaaaaaacaattaatcttttctaccattaaaaaaatgtttaagttttttagaaactctatttaacttaattttatttaaaataaataaataaatatttttttattaatatgaatatccggattagtttaaaatatttttttattaatatgaatatccggatcagtttacgcgtactttaacaatgttattatttaaaatattttatttaaaaataaattattatcaatttttttttaaaaggtgctggtcttttttaaaaaaacttaaaaaattgtaagaaattaattatgcaatcccatcatatattttgagcatgacgtgagccacagtaatcgacgggcagcagccgagctagcaaaagaagccagcgccatacagttggcgccatataactggcagttaagaatcttctttaattaataaattaactaactttttattcagcaacacaaaagaaaagaaaagagaaatctcttcatttctcctttctttcatctgcattataatcattgtttagagagagaagaagaggaaggaaggaatt

SEQ ID NO: 42 - DNA, 3118 bp, Poplar sp.
tcactcatttccatatcttgtaggctagatttgtctggagcgatgtctatactgaacttgtattgtttgacagaagtggcaaccaaatctttccaccttttagtcttaaaattgtcaagctttatactaaggccatcttggaaaaaatagataagtagtttctcattgtggataacttaagccattgtattgtagtaagcctttaggtgagtcagtgggcattgcatttcagtgtattcagcaaattcaggcgcttgaaagtcttttgaaactgcaacatttaacactaaacacattttagctgctttcactaggttatatagattagactcttcaatcatcttcattttttcatccaattctgcctattttttgtaagccttttctataagattcttttatagagctttttctctagttaaacctaccacaggaggtagccttatggggtaaataggtgggaagcataacagctggatatgagggttattgttgtttgaggaattagagcttccacaaaccttattcttaatgcttacttaagtaggcttgttagcctttccatgtctcccttaaagctctctatttccttctgatgttcagattccaagcatgcacgctctttgttcttctttagcttctttttggatcttgtgttaaaaattcactttaaaaggggacctatatttcattaatctgatgatgacaattaaaactaaaaatatgtttgcatatgaatgcttatgcatgcttatgagaatgtatattgggtatagattagcccttccgagcgaatcaaacatctgaaagcaaaaaaggtctaaaaaaatgaatatgaataggttttctacatggtctaaaaaaagatcttagatttgtctagtgatagtctttgtaaagatagtatagggacgttgcgaggattggttaaggtatgtatgtccatcattactaagcaagcacttaaatatgagttgagttttcatgactctaaaccctgacccatagttattgttggataatatcggggcaaaccaatatttttgttatgtttatttacataacatagttaattaatacatgttgtcgtcataattttatagaggttcgatagaagtcatggatgatcgttcatggatgtatcgggactcaccccaaggattgcgggggatggattattgtaatggggttcagggttttattaatttcgcaacatctatcccgagaaattttactgatggcggtattaagtgtccatgcaggaagtgtaaaataaaaagtttctgcatcaagatgttgtaacgatgcatcttctaaccaaagggttcatggaggattacctgtgttggtatgtacacggagaactatttgttcctaatgagagcatggtagaaaggtggttgggtcaacttttagtgctagcaacatgcatgaagttggaaatgacagcagtaatcattacaggaatatggttatggatgcaatgagaatgagtgaaggtaatgtcagtaaatgtccaatcgtaaaagaagaatctaatgcagatgcagtaaggttttttaacctgttgaaagattatgacaaaccattatgagatggctgcacgaaccacaataaattatcgaccatagctcaagtatttaccatcaaatcagatcacgggttgagtgaaggggctataacttcttgttgttgccattattgttcaggggaaatgctgatgttttgggtagggtgtggccgtcgtggtggtgttttgggcagcatagaaaaaaaggtgtttagggtcttcaatggttgttcccaggaactaaaccccatgcaagaaatttttggaaggaaaaatccaatcaaatctccaggcaatataagagaaaaggatgaggttggtggctaaggttttttttggtttttttttttttaaatttcacgataaaattttaatatttaataaaaaactttttagttattaattaaaatataataataatcctatttaattttttgatgatttatttttacgcgccagctcgaagatgaatgtgtcataaacttcaagattcaaaagaacagagataaagtggccttactgttccacaatcaacatttgatttggtgcctaaagttagaaatgaaagtcttgcttacttttgaagacccagtgaactttgggccacatgccgtcgaagatcgggggttaaaaatccaaaagctatactctctgagctgggtagctagagggtcttctcataagaacatgcaccaccaactcccgtgattcatgaacaaacattgctccacaattaagacgcagttcaatgggtggttgtcttgatggtcacgggcagaaaacttgttggttctttatctcttaccgtattgcagagtctctgctgcatcatggcaaaggactggtttcgaagcagcaatgttgacagaggacacagggcaggagcacagaaatatattctatctggccccaaaagtcttgtttctgcttcaacatatcttttctcccctgaaccttccatttatttgtgtgtaaatgaaagatattttgtaaattttcttcgtacgttttgtgttatcgtcctcatcgagcacaaaaaaatgaaagattgaaaatggattgtttgaacgtagtcaaatgaataaaaaaagaagcaaaaccacctcaaatgtctcttcactgctcaatttagatctaaaaaaagcaagccaactcatccgtccagacaaccagaatctttaaacagagtccatcagtttcctcttaagagtttaactaaaaattaactttataaaaactaatttttgacaaggacgtgggccatggtaaccgacaacagccgagcaagcccaaaaaaccagcaccatagagctggcgccaagcggcggaccccatttggcgccacataagtggcagttaacaataaaacagcaaccacgaattgataaattaactaactttacctttataacattcataagaggagaaatctcttctttctctctaatttacatctccattgttgcatagaaactctctgagcttcttggagagataaatatattgcttaaagagagagagagagagagagagaggaagaaatcaatt

SEQ ID NO: 43 - DNA, 3149 bp, Poplar sp.
taattaattgtggcaggatcacagttcgcaggcgctcggatctgtctctgggccttaatgttggtgaacagtgaacacccaaaaagaatgttgccagtgggctctttaaggcccagtacgagaaaaaaagcatcgcaatgttttttgttgatggtcccaggagcccgttgtctgcagaatgggctctttaataaagctctcgatgatcattccagatagatttttcacgtcaaagagttgctttcttggttaaaattaaggagtttgcttcttttattttaattttccgggttcaaatcttgaagttaatattcaaaaaaaaaattattacgcaatcttatacatttaaaaaagaaagagaatcataatacttagacagagaacagtgaagacaaatgatatatggatacaagaggggacaaattacatacatgtccatgttctgtttgtcctcatccgccatgtactgtactggatatatatatatatatatatatatatatacagacacacacacacacacacacacacttgttgttgttgattaatgccagcaaatttatgggaccttgatgatgccctgctgtttttgtttttctttcttcattttctggtcgaaaccaatttaatttccatttacaacaaatttaaaagcatgtatttactctctgtcattctatatataaatgagagtgggagaagaacagcattctctctgttttctctgtaaacttgccaaactctcataagtagccaccctcttcctttactgctatgctatattaactcagtaaagcatgcaaaaaatgattaattattatggtgaaaattacctatattagattttgataattgaggttgagttttattttatagatctaaggcttgaattcataatacgagcgcggctacaattgcacatatatttttaaattaaaaatattatttttgcgcacatgttttcaaatgaacactaagtctaataatgaaaaacttattttcaattttttttatgttcttgtaatttaattaatgcatattgcactagtgtttattaatggtaattaactatgagtcattgtgcaagctactaattaggtgagaatagatggagaggagatggtgataagaacacttgattggatgcatctttgattttgtggcagaaatgatagtttttaagaagaattgaattttttttattaagtttttttttaatgtttttatattgttttaacatggttatattaaaaataaattttaaaaaataaaaaaaatattattttaatatatttctaaaaaaaacaatttaaataccaagcagacaatgattacactccctctctctggtggctatttttgaagggactgtttgaaggaatattgtagccatgtgaaggccacctgagtgaaggcattaataaatgtggtaagcaactctgttggtccaacgcccggcaagaaaacagagccacctctggacttcgaagcttcatctcaagacttgcatgtgatcatctcggtgattaattgatctgaaatctgatctgaacctttagttaaatcggattgaaattaaatcaattttaattaaataaaaaataaaacagcattgttttatttttatttttttaaaatcttgaaagaattccgtcttgaattgattttaatttatctatcaaactaataactctgatcttgggccgagcaagggatgacccgagcagcacgtgggaacttagttttatacaatagtaagtggaattaagagaaagaatgagttctttgtgtaccgcagttttgggtcaatccccaagagagtgtttttattgtatattggaagtagacaaaaaaagagaaaaagggatcgactacttccatgttaattagagggaaaagaatcaaagattaatgcggctgcggcagttgagattttcaaatttgaacctcaagatttatctcaatttgctcaaccatggtcggcaaagtttgaaccaacctaggtcacaattcctaggctatgatattaaaatccaggtcatgaaatatactcaaatcaattaaaattattttacaagttaaaatgatattcatttgaaatcaactttgaattgttttgtttttttctctatattatatgaaaaactacatcttgaatccacggacataccctgatttagacagtgttcaagaatgatgttgaaattatattttttaaaaatttgaaatttttttatgttttcagatcgttttgatgtgctgatattaaaaataattttttttattttttttaattttaatatatttttaaacaaaaataaactttaaatattataattttaaacactatattaatcgataaatgtgtcacaaacatcttagcaataaatatttgtatatggtattttacaacagctcacagcatctgcaaatgcacatgacacccacctcccgagcggtcctcaattttccacctatgtccaatattaccctaaggaacttctcttatctcccattttctccattaatcccaacaaaatccacggtcaataagacagcaagtttggagtgggtcccaagaaaggctggcgccatatggtggggaccatttttattttttttatcggattccaaatcttctatcgaatttcatttatgtctccttcaaatcttgctgtccaattaaaaaaaaataaacagagagaaaagtggatggctatagttgtagtccctataaattcaaaaatgtttcattcttgaccctttgttttagattctccaacattaaccatagtttgttcttgttttccgtgtacataatgcaaagttacttattgttgatttccattagctatcagcaaccaggggctacattgaaacatattggaaacaatgagactaacatcatcgacacgttttttaaagtacataaaccggaatgaaatgttctgaatctatagaggtggaaatatagtttacccaagaaggcaactttgtatagagatagagagagactgagatccaagaaaaaatcttgcatccttctctcgatctataacaacgtcaaagaaacacagatagagagactttgagtgtccgaacagagagagagagaggagactgtgagtgcttagagtcaaggaaaaaag

SEQ ID NO: 44 - DNA, 3007 bp, Poplar sp.
taatatattaacttggttaaaccgaccctagtttttttagttgttttgataattgttctctaaacacacttattctactgcaggatggcttagaaaggagaggctttaaggaagttggtttcttgaatgcagtgtctgatgtggttagcacaggtaatttagaagtaattatgcatttatttttgcatgtttccccagtaatttggctatgttaacctgcataagttggtttcttaatggtcgatgattgataattttatggcaggtgtaacaccagcagaaaagcttttggaactttaccatggaaagtgggggcggtctatagatcctgtttttgaagagctactttactaaggtgaattagatttttgtagcactgcagcagtgtcctactgtgtaattctctctctctctctctctctctgggtttaaaccttgtttatgttctgaactactttcttcaactgatactgatagtttgtctgtcttttgccgaataaatttcaatgtaaatccttggtacgaggattctcacaaatctctcatcgaataacacccagacagtttggaaccagtgaacaattttttagcttccatagcaataacaagccgatcatgtgcttttcacaagcattcattgtaacgtttccctccttgtgtcacgcatctcattctcatcatccctaatgaaaatggttaacccgatttggtatctaattctattttcacaaactaaccaggttttcattgatcacagtatgcaaatggattatgaggttggtgaagtgtgtaacagaaatatgaaaggaggatctaaacttaaatgctccctattttcagttcaaacactgttacatggcaaacaaaatgtcagtactcattttaagaatgatggtagctagcttcatttcataaaaagtctgttttcagtaacatcctacatttccccacaatagtaggaccttcaatgctcttctagcaagtatttaattgtcaattgcttgatttgccttttgtttccctaaaaccttatgtgatcttgtccaccaaccctatctcaccaggtcaccctccacgtccgagccatgtgggctgccagcacccaccaggtaccgtgtgcttcccatacccgctagagatacataccccaccatattaccatataatatggtagctatccatgccactgttttgtttagtcaaatgtatctggctggagtgagaggtgtgagattgctgcccggggggggggggcgcttcctaacataagagggtggtaatttagatggggactggccatcatccctaccactcttgagtaggtgttgaatggcttgaaaacgatgctataacagcaaattcttagacacatatccatgaacatcatcaaatcttatctcgtgctacctttttgtctgttagtgaagtaaaatgctagtatgaagttttgagtcaaaattcagtcagctatcattttcccattcaatttagcctgcagcagatgatgatgatgatggaagtatactgagatctgttgaatgtttattatgtatttaggtttaatagattatattagaagcaaactaccaaatcacacttttctcttttggctcaatgggatttttttgaacctcagactacacaatgggattataaagtatccatattttcatataatctcttcaggtgatgtgaaatcatttatcatattatagggaggacttagcataggatcccaacatcaagaagccaactagtccttgcggaaggtctggaaggagggccagaaagaatacttgtttaagaagagagagacagaccgaaaacaggacggtctcatgccctccaataattgaagcttcctagctctcacccttgtgacaccacccttaggttttacatcgcaaattaggcacctaatttgatcttaaatcactaatgcgatcttacaccatgatatttgtggcataaccaccttatcagtctgaacattaccagagtaccctccctatatgtctgtcatctcatttctgtccgagtgaccaagttgtctgaaaaaatctcgaaataatgaagaggtttctattgactgccaagttttattgatatgatgctagaccgtaaatttctaccaggtaaaaatttgctggcaatgtggttaccttacctggtgcaatcaaggtactaggaagaagattttaatttcctatatatttgcacgatcagtatgttctctataatatgacaagaactcagtagttatttaatatttttgcttaagaaaacagtaaaactctacaagccaccaaggaattagagatgttcatcaaaagaaagacaaggcgttaaagagtgagtaaagggatcagcattcatgaaatgttctcgttaatacaccattccagaaatggtggattgaagtaagaaggaagttgataataaaataatagaattccatccaatcattttggaggagagcaagctcaaggcagagagagagagagagaaatggaagtaagaaggaagaaggaagttgataataaaataacagaattccatccaatcattttggaggagagcaagctcaaggcagagagagagagagagatggggcagttttggaatcttaaatgacagacagacagagagaaagaaaatcaatcatactggaggttgggttggctattttagattgagtgaagccaatgtatgattgcaacttcttgttattattattatatccatgtccagctcacaactcttgttggagcttgacatgttcccctcctcctaacggagacacatcgtattattcattaaattttctctatatttcacactttctgacacggaagatatcaaactcaccttcttaaaatcctacccctcttgcacctacaaaagccctgcgactttacattcttcgtcactctctcccctccagtcccctctctatatttcttctcttaacattttcatttttttttattaagactaaccaatcaag

SEQ ID NO: 45 - DNA, 3000 bp, Poplar sp.
aaaatgggccagggggttgctcctttttctttttcttctatttttatttttttttatattaatgattttttctctatttttttttaatttatatataaattaatatcccttatctcttttattttgtttgaagagccctttttaaacgataattatttttttagtgatgcatttaatttcgaagagtttttgtgattcatctatactttttttattttttatatgaatgaattttatttttggaaataaaaaaaattatttttagataatatttctaatatgtgcagctttgcatgatgttttttcccattttatttttttcgatcaatttaatttgtgtgtctatttctattattgtttgcttaaataaaaaaattagcaaacacaaccaattaaatgtcttgtttttcgagattaaataattcgatcaacatttttcttgatcaatttaatttgtgtgtctatttctatcattatttgcttaaataaaaaaattattttaataaaaaaattagcaaacaaaaccggttaaatgtcctgtctttcgatattaaatatcttgatctatattagtgtcttgatttttcaagttttattttgaggtatcgtcaatgacttttttatttatttattaacacacatagtttttgaattatttgattacatgcatacataaaattcttaatttgagcttaaatttttcaaactacagtatgaaatctttttataaaaataaaaatatctgagtctcaacattgctgcgctagtcccataactagtgtatcctaaatcctgtccaagtttttgaaatccagatagaggatgatgccaattactcattccctttcaacggggcgctgatttaagatttgaattctttaaaattagtcaaagaaagaacacaaacacaccctcccccccctaattgcacagtccatactccatcttttaagactaattcattcttccaatgtagggaaggatgccggcaaaaaagtgcataaacccaagtggctttgcaatttcaagtttaatttatacactatccccccccatctcggtgtttaattcgtgtcgacactcttggctgaaaacgtcgtctaaaatcaaggaagcgagaaaacaatctcggaaccaaacagtgccatttccccatcggaccgccctgtagagagtctgcttttggataaaaaatcactctcacattcagagacctaagcgatggcagcatgcttggctctcaatccaagcaaggaatcagttttcattaatggcgaggattagtggaggagggagggtgtgttaattaagctgctttaggtacagagtctggatcccgtgattatgatgttgaatccataggagataaggaggagagtagctgacagttcacatggggacatcctcgcctcatgtggcccttctagcaaagctctttcccaccttttttttttttgtccttttttgccatttgaagaaagatgcttctctcctctaatcccgttccgttacttaaacttaacagtgattcttaatcaatgcaattggcaacagtgccttcttctgataataaaatacgtgaaaggcccatcgcgctcccaagagctcatcattcaactttttaccctgttgatatcttcgtatcaaaattattaaaaataaataaaaatattattttagataaaaattatttttttttcaaaaaaacgattgataaccacttttctattcccccatttgtaaatgtgattccatttgagtccccaaaagttaaaaattaagcaacgctgtcctcgaatttgtgtcctctatttgctatcatcctaccttatttcttgccttctcgtatcttgttctcgataataaagttttaaaattcggcccagcttgatcggttgatccaggacccggccgacttagggctgtaatcaagccgggttgaagaaaaaataaaggaaaaaaaaaccatgtatgaccccgcaagatccggtcaaaaacccggttacaactcgttgactttttttttactaaaacaacgtcattttgatttttttttttaaaattgacccgggcgactcggtgacccagtcaaaacccagaacccgggccttgaacccggccgggtctaaaaagtaaaaactatgccagatagagcggcctaggcacctaattgcaatcatctgcacgttgggacaccagtttgtaattttcccaagaatagaataagcacaagatctgtcgtttcaacaggtcattattagtccattaaacccatttttcaaatatcaaatatcattgccctgtcaattcaaaaccaacatctacaccgttgaacatcacgatccaacggcatccaacggactaaaacaaaaggagagggaaaccacgacagccgtccgatccacacacctccacccctattttcctcctttatataactactcattcactccattttcaaaccaaattattacttccctcctccatcactccctttgatcgagcctctccaacgctcgatctctgaaaacctcaccggagacaccgcatatttaaatccggtcaccgatttcgtaacggtgagttctcgatttctagatctgatctcttcttccgttatcgaacctgtcttgatgccgagaaaacataagaaaacaagttaatatctattttgttgatgaataattattgaatcttatttttctgagtgaattactttgtttatgcagtctcattgcactttctgtttttttgcattttctctgcagccaaacaggctggatctgtaattattctgtttagactttttgttaatcttcgatcaaaagctttatttagtcacttaattaattatttattaagatataattgtctagtgaaatttacttacgttttagatctgttctccatgttttaaattataatttctcttatgctttacctagtttttctcttaccattaatttaatcatattttttctcaacttgcagagataaaaa

SEQ ID NO: 46 - DNA, 3000 bp, Poplar sp.
atatacggttttaagaatacttagttaattaatactgtttaaagttatccataatgttttttttatctcttgtttttttttatttgcaatttaattattttatattgagttgatttgagattagaatcaattttttttttaactctatacaaggctctcacggtgttaatagtagatttcaatgttgagttaatatttaatttaacaaaataaaatttaattttattaatttaaactaattaaaattttaaaaacctaatttaaaactggaaaaaatattctaaatttttttttataaaaaataatatctttgtcttagttttctaattcaatctttgactataattaaaaaaattatcataatttattaacatatataactcttaatttattttactataaatgttttagtttgtagttaaaaaaattttaaataccataaaaaaaacattaacagcactcacgtttttttttacgccgagaaaaaaaaaaaaaactctatcatgtggtgtaacacgtggaatcagactaatttaaataatgaggagtgaaagaaaataattgtcaataaagttaaaaatcacatttataaatgataaaattgttatttttgttaggtgttacttccacgttatctacgaaattggagagaaaggtttacgtgggccattgcagagtttgtttttcccttcattttctttccccacactctcttttatattccccaacaactgaaaatatcttgaaaattgcatttcctccctcctcattttcttgccctccactttccaccctttccagacactcttgactattgattcgatgagagaggaaaaaaacacgtgatcaaataatagggatggcaacggttatctatagattagattctttatatgtatacattttctattatttataggataaaaaacttagatatttatataatattcattgagtttcaagcatcaacatggacatacattgccttatttattataaaaaaaaaataacagtttatatatataagctgtatataaaatataaaaggttaccttttaaaaacagaccataaataccatacctttaaaaaacaaaaattgttaaacttgcatccaatagtttttttgtcttttcaattttttttttaatgataaataagctcatagagtttacttggtcttttacttaaaatgaatcttataaaaacaaataaaatttgttattgtgttcaatataccattaaacgagggggtagtgcatgtgacgtcattcactttcaatcattgactttcaggatgatgtagaaaacatctcgccatcttttatatattggtgccaggcatgtatatgttggtgtggtggatgaactccaatgaacttttatttttcttgtcattgtcaaaatataaaagtgttgtttaatttgtttttttttttaaaatttgatcatcatttttttttaatatttattttattttgttttgtttttttatcttttttaattaattgttttattccatttcgctcctcatcatttagtttcatttaatttttatataagattcgatccttatttttctgattgctattttttttttaattgatttttttcaatctcttcctgcatcatttgattttaaattatttttatataaaatctaacccctattttttttaactattatttagtttgttttcatcatttttttattgtgtttttttttaatttcatccctcaatattttgatgatttaaatttttgctttgttattttttagggtttgttttttataggattagtcttgggctcaagacccgagtcatgggttttagaagttaacacatgttgattttttttttgtcctttatttttttaaaattttatttttcaagatttaatatatagggaactagtcttcgtgttttttttgtcattttcatggagttatcccaatcatgtgatcattatcataatattagcgagttaacttgaattttttttgttgttttttttaactatttacttctaaatcttgtcctttaacattgaattatttggtaattaaatttcataattttttttagcatgcttttaataagataacctcgatattataaccagatatagattcatgctatcctgaatgtgctgaagttatatttttctattattttttacatttattatcattatattttttttatttatattatttaaattgataaaattcattaaacataagtgaataactcaagtcttactcgcagcttagcacggaccgtatccagtcactatcaaacggcatctaacgggccaaaagaaaaagagagggaaacaatcatagccgtccgatcacacagcctggccccgaccttcttcttatatacgcgcggattttaccatctctgcactccactcttcacccgctccctctcacttgctagatcgaggctaactctcactcgatcgccggaatcctcgccggaaacgcctccctgtcacactggtttccgatttctcaacggtgagttttcatttccagatctgattcctctctcatttcaagtccgtctggataccgagaaagaacatagagaaaccgcaaaaagctgaattcattctgttttatctttccgatttgaacttgtggattcaatgctttgttttcttagttgtcgcggctttcatttgcttgcattttctcataaaccaaacaggctggatcggtgacaacacattgttttaagctactagtgtgtttatctccgctatttttagtaatttaattgttctttgccaacagtatcttctccttcgaggatgtgaaatttgtttcgaatttcgcctgctgttttttttttttttttaactcaaaatcgtacttttaaatagagtctcggatctgatgtctctgtgcaaaattattatttttttcgagagtgcttaatattttttatccggcttgccttttttgtttctgcagaaatataacataaaaa

SEQ ID NO: 47 - DNA, 3000 bp, Poplar sp.
caatattagcactaataatttaatataagtgaatatttagtgacaaaaaatattaaatatattatagaattttgtaaaaaatttagataatatttacattaattacaagtccattagaaagcccatcagaaaacccattagaaagcccaaaaagcctaaaaaagcccaaaaaaacaataatacaggttttccggtttttctgttaaaaaaaccgaaccgaaccgaaaccggtcggtttgaaccggttccggttcgaatttttcagtttttcaaaatttaatttttattagttttttagataaaaaccgaaccgaactgaaattactcacacctactccagcgtcttctttgtttgttttcttggttactgttctctcgtgttcttgtttgtgttgctggattcgctaattaatgaccacaaggattccacattcggtccaagacaataatcaatcaaattatattcacttaattcctcttcgctttatgtcttaatcatcgaatgatcatgaacgagggccgtacacgtggaattattgacctaaaaatgaaggaacagatgaagtccaagttcaatttaattattccctaataactgctctgcctgtctccatgatgtgaaatcttcaattggtaaaatgaaataatagcatgcatagagtaaaaggaaaacatagaggaaaaatagagcttaaaataaaagggaataagttgaaaaccgaggtgaagaagagtgtaaaatattctatcataatatatccagaaatactattcctttggttttttttttttttaataaaggatttggaatcaaaactgatataaaactatcaaaattaatttatgcgatgatcaaccttaattacccgtcacaaaccataattagacttgatatctaggttgaagaaacttttcagactctttatttataccttggacaaactaataggctgccaaaatattttttatgcattaaagaatcataaactcaaacctaaacccgaaaatagattgataaaaaataatttttttatcgtctaaaaattattttatgataaacccaaatctaaacctaagcccaaacccaggcttaggctcgagcacagaccaaacatgtgtgtgtgagactttaagtccaaaacccattttacttaggttctattttctctaaaagctttggtgtaattctttatattcccattatataaactataaaaaaatcttgtttcttttctatgtgagataaagggttttgaatttttcaaattgaacctttcttagtgaaatattattgaatttactatgccaaatggtgaacgtaatgtctttaactattcaaccttttatataaactaagataataatattcatatagttctctaaacagagattttattttgttatcatggttgtgtttatttgggctaaaacaactttaggcttcacaagagctttagaaaagtcaaactttttaaaatccttaaagaaataattatatttcttgctcatataggtgattttttcactataagtattctgttgtattccacttgatatatcaagatatgaaaatcattaatagtgtacaactcatcttctatcacagcacaactaacacgtttttatcataagaatatgcaagaaataataaattgaaaatgttatacaacttaatttttctatttgaagtttgatagtcttcatttaaataaaagtattttaaattcataaagaaagaaaaatataattacatgttactaataccatcatcttactattactatcatgccatcataactttactatcacttcaactactagcataatcatatagctagtattacaaccatcataattaatattattatttttataattatatccaacattactactactattatttctagtactacctagtaatttcaatagagattttttttaaaatatttttcttaatcctataaagagatcattgaaatattaatttatatttcattatatcattattgtttctttctttatatatatttgatattgtgatagcttttacaattacggttgaaattagtagatttaaaaagaaaaacacttttagttgtagttttttaaaaaataggtttttttttaaaatatatttagttaaaatttctacatgcaaaataaatgaaagaaatgtcattttagtttttataaaattaaaatttgaaatacaatatgtatagggtcaatataaaaaatataaaatatttaccgaactaaataattttttctttatagataaataaataataaaaactagcacaatactgatcgatatcttcgtggtgatggcattcttatactcatcaaccattcccaaatcccaatagtacgaggaaaaagccacacgcggggtgggtcgataatggccgttctgtaaatcatacaagagcagaaggaaatgacaacgctggccattaaaagcggcagatgagaacatggctgtaattcatctgggaagatagcaatggctcagaaagatcatgccatgccaaacaaacacaggccattcatccctttcccctccactctatccaaaattctttccccgtaatgaatattctattgcaagtgccaatgcgacctcgtttgaagaatgcaagagctagctagtttggcccacttacaagaaatcaaaggtggaggcccaaagattgaaaaccagatgctgtagagagtctcaagactctacagtctacacacgattatgcaattttacatgattggaaaatggaatggtagagatttggagacacaaacgcaaagcataaccacagccatacattgaatgagaggctatccataatctaatcctctcttattttttctccagtctgtcttctctcaaaccacccttctctacttgtagtgctgctacaccaacacaaacactactactactactactagtagttcgaagagaatttctgcttttgtcagtgtgtttatcctaccata

SEQ ID NO: 48 - DNA, 3168 bp, Poplar sp.
tgattcgcttgcctttagctttatttcttaatcatggaagtcatatatataatcaatcacgaacctttagcagcgaggagggggagggaaaaaaaagatttcagagaacgaggaccgtacacgtggaattattgacctaaaatatgaagctaaaagaccaaggaaccgatgcagtccaagttggttttccagataactgctgcgactgtcgacgaagtgaataaattaataaaaagatttggagaccaagatgattccatgtatttatagggcattgaacatggctctgctgcttgtagctttgaatcacatcaattgtttctaggtctaaccagagctggtgaaatgcgcaattggccaccatgaaaattcgacatgtctctagtctcctcttctttcttcaaaattcggtggagttctaaatcctcacctcgcctgttgcatgaatttagattttgaaccctccaaaaaaataaaaatcagccgatgggaaaatgtcaacggtgatttctatcatggctgccattccatcaagaatataatcattgagagattcatcgatgaaattatcacgccaaacaaaaaaattctattgacaataatctcattagtaaattcactggatcttcacccgaaccaatgagagttgccaacaattactcgatgaacttgttctcgtatgaacgcttagacgatcggtgattgctggctcgatccagattgtggggtcctaacgattgagacactacaacacactcgtatatcctcgatcgtaatgttggagatactgcaaatccaattttatcgggtccatcggtaaatctagcctccaactacaaatctggatcgagtactagatggatcaaatatgcatccccgtatctcttatgtaatcgagtgttatatatttcttggaaaaaagtcatcaaatataaaaaaacataactgaaaaaatatgtttaaatcatacgtaccatgaacttcttgactcgggtatttatgagctactgcacctctttctgtttgcttttattctgcttgtgagtttcaacaaaaagctccattggtcttggatcgcgcccaagcactgtagcctgtaaaagaaagatattgttggttaaatattttcatataatacaataattttaaaaagaattgtcatataaaacaaaatcttaccatttgttttgcatgtgaaatgaatataatgaatccgctagtgtgtgtggtcatggaaacataaatcttcctaattcggttctttgaactaaatgatgatcgccttaagaaatgctctgacatcacgcgttatagataaacatcctagataccttccatgacatgtagagtcttgtttatttaaaaacattatcatcgatgaatattttttgtattaaaaaaattgacccggctcatacataccacgtgacactctagtattacctaaactccatgaatgacatcaagaaaaccatggtatagagagatgacattaagagagagaaaaggtaagattagaggaggaagttaacatttaacactctccctaatttctaccttttattatagaatattttgattgttatttttttttcttttttgtcttgagtccatctagagtcacaaaggattttgaactatacagtgaaagtagcctttttcttattattatataattgagaggattaacgtaagatagaactttcatttgcttccctggaaaaacttatagatacctaaacatttgaccaagcttgtgtgcgtgcatcttctctattaagtttcaagatttcaatcattctccacttacgttagggtgaaaataagacttgtattctctccgaaacctgtttggaaatatagttgcggttactttttaaaatgctttttacttaaaaaaatatcaatttttttttaatttttaaaaaattatttttgatatcagcgtatcaaaatgatctaaaaataccaaaaaaaatattaatttgaagcaaagaaaaaaattaaaaaattttaatttttttcaaaagcgcttttgaaatacaaaaacaaacaaataaaactgcttcttctattattattattattattattttattttatttatatataaattcaatatttgatccatggcttctctatcattattgccatcatcgttttaatcattttacttctatcatgtaatatagaatacaacttgtttttttataaaatatttttcccaacacaaacaaataataaaaaaaataaattcaataataagaaacacattgtttacgaaacaaacaaactgctaaatattaatttatgtttcttctatgcatctatatagcctataatattaaaaatacgaaaagtttttagagctttgaggcttgttttcatatctatgaagtatttgagagtgtgatagtgattatagtttaaagtgatttttatttgaaaatgtattaaaataatgtttttttttttaaaattatttttaacatcaacacatgaaaacaatataaaaatatataaaaaataattttaaataaattttttttaaatttttaaaaaatatagttttaacctcattctctaacatttaaaaacaccatttctttcttagtggtggtggcatctgggtactaccgtttagttaaagcatcatccatttgaatccatccagttcactcatcaagagccaatacggcctctatataaaactctttccccataatgaacattctattgcaagcaccaatacggcctcgttttggtggcttaaaatcaagtgagaaaagagttgcaggctgttttatgacaagattgaaggatgcaagaactagtttggcccacttacaagaaatgaaaggttgaggcccaaagattggaaaccagttggagccagatgctgcagaggctctctactacgcacagtactcatgcaagttttggaaaatggaatggtagagatttggagacaccaacaccaagcagaaccacagccatacattcaatgagaggctatccataatctaatcctctcttatttttttctcgcctgtcatctcccaagccaccatcctctacttctagtgctgctaaaccaacactagaactactgctatttgaaagaaaattcctgcttttgtcagcctgttttgtttccataataccatt

SEQ ID NO: 49 - DNA, 3000 bp, Poplar sp.
gagtcaaaatcaaaccatcacctgctcctgcacttcaatttcttcttcatcatcttcttcttttggagcttcaagagaaacatcaacaacaatggctgctgctactgctattctttggaatcctttaattctaaccagaaatcctcaaggactccacctatctccaggtttgtagtcttcatttttcgcttacttcaattcaattttctgtataattaggtttattcgaggtggctagatattcccatggcttcctttgtttggcacacagcatttgtaaatgaaatattgattatattatttatttatctctgttagcgttgtcttcttcttcttctataaagccgttggacaaacgcgccttgagtggtggtcctggaaaactgcgaataactaactccataaccagaagctcactcacagtccaagctgctgctaatgctgcttataggtaccgtacaattgctttgatggaaatagaagaattactataaatttagctgagaattgcttgtttgcctgtgttttcacagtgatggaggaagaaggccaagcaatgcaagcatttttgttggtggctttgttttgggaggacttatagttggtgctcttggatgtgtatatgctcctcaggtcttgttaattttttccatatttttcttatctctttcaactaagcggtgtgtgcttcttatagcatagttgaagagaattttacaagtcattttgcaagtgaatcttgtttcttatgcttctgtatagatcagcaaggcattagctggcactgaccggaaggatcttatgaggaagctgcccaaattcatctatgatgaagaaaaagctctggaggtgtgctttagttcttgattctctctgttcgtaatcaatttttggcattttaacactttagattcaaccttgccttgtgatttttcggttcttttatgtcgctttttgctatccccgtttctttattcattaatgatctttgggatccggactcacttcctatttacctttcaagtcgttgctactctatgaaagtatttgttgatcgttgtcccggaaaatttacttttcagctcattgctgccatgtcatagcatttgctgatcattgtcccaaaatagttatgaagattagattccttaggagtttgattatttttgcttttgtctctggtttgacatacaatgcgtaattgattccttggcaccatcacattgagtgcgttgcgtgcctgacattttatgatcagcataatgacagacagtgtttgtaatttcttgatttccagaaaactcgaaaaatattagctgagaagattgaacaactgaactcggccattgatgatgtttcctctcaactccgatcagaagatgccccaaatggagcaagtgtgcattctgatgacattgaagctgccatatgagctacctctgtctacgcgacagtctacctggtctccactaccagtaatttccatactgataattaatagcagttgagctgatctttctttgttctcttcttttcaatgaacagttccactgtgacggcgcctggtgtgggtacatgtaattttgcgtgatcggttctgttagattacgctgatcaagtattgtactcgagttatatacagtaacattccagcttttttatttcgttatatgaggagctgtttttttcactacagttgtgctgctataactagaactctccaatgttatgtgcccaggggtcacactggattctatagcctatccttgagccaaattcctcatgtcctgggaattttttttttcaaaaatgcttgatagttaacatgttcttcggggaggttatattcagtactttagaaaaatttgggcactctttgtatgatacgaaacctgcgtgatttgatttcagactgtgagtcagtcatgttgctaaatttgtggagtgatcaagcaaccaacatatggattgcttgacagcatatgaagcagggaaaataatctgcactatgcggtgccttcttcagtcccctcctcctgtcaaggactggcgttgccatttttgctaggcaggtctcccataatactaaatgatatgagctgtttactctccgaagacctgggctctatgctactaatgattgctacatcaagtcaaatgatttgtttcctttcatattgtttttctgaaaatattgcatagactaatccctgcctcagaaaactcctaaataggaacctctatttgagacgtccatgcagttgttcttcctttctgaccttaatccacatagatattttatatttcccagtgttctccaccatgcagagtgactttccctgttaaccagaaaaattcccaggaaagatctactggatgggagcctgaatgggggccatttctactcatcatgtggcccacgaggtacacagcatttctcactcagcaaattagtggctatcaagcagttgtattaaacccagtctgggtcaattcaggatctatttgactcgaaacctttctaaaccagttttgaaaccagattatatgacgtgtttaatatttttaaaccttgattaatcggtctttaattattattttttaaaaccaagtcatttcaactttttattttaaatatcgaaaggatatagttttagctaacttataacccaagttttggactgcatgaatcacatgacgggtttaatacctttgcaattaaagggtctgattttacaactgtgaagagagcagccaaggaaatacaaaagggtgcacaatctgtggtcgagactctcacattacaagctcaattatcatcttatcccatacatcctcatgcaccattctcaccactcgttctttcaactaagttgcggccataatttttttaaaaaaaattggaaaaaatatcaaggaattgtaaaatgagaataactgataaaacgagttgaactatatatagccaagaagtggctctctttagctttagttgcagcc

SEQ ID NO: 50 - DNA, 3053 bp, Poplar sp.
gtactctattgaagaagtctccaattcccaagccttccatttcttcatctgttcaacaaccccagtcaacaaattcttcagagacgtctaccatgaatgaattctagatgcattgctagaattttatgaactatagcttacacacataatattattaaattcagtttaattcagcatattagtcgattagaaaatcttacctgaattaaattttaaattaaacaggtaagagttgacttaatcaaatatggttaattaaataaatgaatttttgatccaatcaaaatttagtatgattatattttaaaaaaagatattattttaattatttaaataaataatagtacgaagcctagctgagtagcattgtgttgtgtatgtatatataaatgcatagagagagctaattatggaattgaagcttacttttgcttgccccagtgccatagtaacgacactgtaaagaacatgaaaaatggcaagaacaaatagaaatatgtgcaattggtgcactcctgtttgcgaaatcaatgaaactttaccctgcaaccaaataaagagaaataagggattaatttatcatatttccaccttctccatattcgttaattcttatcgattacaagaagttagctttgttaattaatcaccttggagcaatagccgcccgccgccagctgccgctaaaactctgtggattgctacatttccggcaaatgaaaatagtttcctcttatgatcacctccatcattgccgtcacctcctttaccaccatttttatctttatagttgtccccaacgtaatcatatttgcagggaagcatgacgttttcgtatttctcagggatgcatatctttaagatggcgcttgtacccacagtaattagcaacgatatgaagcccagtagcattaattctgtagtgacaaacatactcgtcaaattaaactaaagaacccagcaaggtgtaatttttaataattatagacgcagctaagcactcgtcaccaaaaatgttgtttctagcagcgattaaaaagacttgccagctttaattttctccaaagcttcactcatggccttcttttggcgtttttgaaaccactgtagtgtgcatcaaagcacaggggaagtgagaacaaattaaaatatagagctgagcacagattttaagccgatgtaagaatcactcacctttcctaacgactgaatcccatgttctatgagaacagataagaccacaaacactgcacaaactgccgctacagcccatgtaggtgtgttttgcaaggtcttgtctccataagaaccagctgccatggttgctagccaaattgcactccgttcaaacttcaagcacttggtaggaaaatgggcaaactagaaatatttctcggccaaatttatggaactgatgaccaatcatggaaatggaaggcgcgcaatggtcgtagatttatgcttaagatttgccaacaacaacgcggttttaatgtgtaatgaaatttgtcattaccttttgttgttattacatgaggctgggaatattagctttgtcatctgaaattccgtcacttgggaccccttgacatgagccggctgagtcaaaaatcattaatgggatggatcgaaccattgtcatggctctacattaatgaaataaccttcaaagttttgcatataaaaaaattactataaaaattggcttcttgcatacagtatttttcatcaatctctggagacttgatgcatcatatgtggttagagaatgcgttgaaagagtcaagaaactaggcagaggttaccatttcaaacaaacccactaaactaatatctgtcgttttgtgattttaattgttcaagattcgatatagtttatcgaatttatgctttcctgtactacgcaatattgctagtgatgttcttccttgatgtagttgcttgaaataggattcatgccgtgtgtcggaggatgacatgtgaagagaaagagtatagttgttagacatgattcgtagattagaagtcttgaattaacgggatcatcaggtgaatttgggttaatcatgtataatatcaaaataatgtcggttttttttttcttagtgttagtcaatcaggtcacgaaaaactttaccggtctaaatttcttattcggtgcaactagaaacctatttcgagttaagctatagtttctgaattttcaagtttaccaactataagaaagagatatttgagcaatctgcgcccctgctgtgccgtccgcacatgctggcattgccatttgttttgatagttctcccacaatacaaaatgatgtgttctgtttacttccaggaggtcagggctctatgccactaattaacgagtgcttcatatagtcacaaatgatttgggaggtggaagtggccgacggattgtttcttcttgttgtagttttccttttcttgtatttttttttcctgaaaattttgcatggactaattccttcctcggaaaactaccaaatgcgattctttattcgagacattgatgcacatgttcttccttcctgacctgaatatttgacatggatattttgtattttccagtgatctccaccatgtacaatggctttccctgttagccagaaaaataaagaggagaaatctactgactgtgggccgtttctccacttcatgtgggccacgaggtacaaaaactacgtatctcactcaacaaattagtggcagttaaggggccgatgattttagagccgtgaagagggcgttcgggaaaatacaaaagggtgcacaatctgtggttcagattctcatattacaagctcaaacatcatcttatcccatacattcccatgcacaattcttaccaccacacgttcttttaacttagttgcaaccatactttaaaagatttggaaaattatgaaggaaatgtaaaatgagagtgactaatgaaacgaattgaactgtatttatagtcaggaaggaattgaactgtatcccagccaataccagacttccatccaagaccaaccactctttccctactca

SEQ ID NO: 51 - DNA, 3042 bp, Poplar sp.
ctttatgcataccaatattgaattaaaggggcgagagtgaattaaagtcgctcaacatccactttcaaataattgctgatatttacctaattataccagttcaaagaaaaaaatatatacaatactgagatatagaatttcaattaatcaaataggaaatgatttaagtattttaacacaatttcaaaaatattttttaaaaactattgctccttccctctttgtgtttatatttatctattgtgctttgttattatactctattgtgtttttttaaaaaatattttatgttttaatcagagttttaaaacccggaccggctcgggcgggtcgacccgggacccggccgacccgggcctgggatcggtcctggtggaggcaaaaaccagcttgggaattggtccggagaaacccagtcgacccgggacccggtccacttggtcaacccgggtgagaccggtcaaatttttttttatattgatagtcattaaacgacgtcgttttgacattttaaaaggccaaaacgctgaagagtgaagaaaaacaaagcaatatcagttacaatttataaacctaattaactcaactatttgaaacctagctgaggagcagatgagcaaaggacgtcttgactattgatcgctgttgtttctctgcgaaaaaggtttgaatctccttcttttactatttgtttttttttattcttggccgttgaaacaatttgttttcaaatatggaattaagcacaataatagcaaaacaccatcagttagtcgcccccttcccctctcagtctatcgaacagctgaactgcgtgccttgtctctttctgatttaacaatggaggagaccgacgcttctgctctcggcgagaaaaccataagcaaaaacttagtctctctctcatttgttcttactggaaattttgttttctatttttttttagtgatggatttaattgtgacttttgggtatgttgctactcttgtagtgcactaaagaaggaataaagaataagaagaaagaagaagagagacgccaaaaagaggtgtttttttataggtttttttttagttgacccggatcaacccatctgacccgtgaccagatcacttgaccggatcaataactggattgggtttcaaaactatggttttaatattttaaaacaggaaaagaaacaaactggcccagactggctgacgtggctttcgaggacctggccagggtttctcagctccgaaagtacacgacaaactcgcctccgtgtttcacacagttgcaatcccctaatgatagttgttctagcactgtctccgtacaaacaatttcacggaatttgtgtggagctctgttttttctagttttacatgtctattgtaaagaataccaagggcaataagcaaccatgactgataataaatttctagttggataaatatgctcttcgaatatcttatttttttttattaaaaaaatgaataaataaaataaacactcgccatagtcatacttatgctctttaattttttagtatatatctaaattattttttacttgaaaatatattaaaataataattttttattttttacaatttaattttgacatcaatacataaaaataataaaataattattttaaaaaatatcaaaaatacattttaaataagtttcacttaaaaacctttgacccactttttttgccatttaaccaaccgaatataaaatcaggagaacaagagagctcacaccagaaacaatgtgcctgctcgtacattaacacaactcacccgctgatagtttgcttttttggagagagagagagagatacacaaaaaataaaaaagtgagctaaggacgtccctcataagaaactccgctaaaaatttccttctctttctgttaaatacactttcgattttgcttttaaaatacgatcaaacgccaccaacaactaccatttcttttttttggttctttcattttcctcgccttctgctccctctcaaaagccgcaaaccaagccttggtttagtagtagggttcttgagagaaagagcttggtgttgcactcagtacaaatggctttctcttgtcttctcagatctacgcccgccgctcctcttgttgaagcttcccgctccgacttctctccttcaccgtccgatcgattcaaggtatctgctcctttttctcctatcaactctttctttttgaaagtccgttagtcgcactttgtttgagcttgattttggtttttggttgttgagagagaaaaaaaagtagagttaaaactagatattgaaattgttattcatgaaaaaataaaataaatatggaagttgcctgacttggaagttaaatctgcaaataacgagagatatgaaagatataagatagatagtagtgtatacaggttatttatttatttatttgatttcagttatactggttttgagttacttatatctgtttggttggcgagaaaactgaggaaaatgaaacagaagcttgttttaaaacaaactgttcaaaaaaaaaaaaggtgatatcagatcggtattatcatcaattattattaaaccctgtgcttctttagcttatagctcttatattttgagtttatttagttttaataatttctaatcgttataaagaatgcattaatgttcatatatagactaagcttttgacaatgtgtctgtctatagctgatgagtggtgtgaagtgccagttactatttagagatgtatgtaacttttggccatttttagttttaatctttccttttctccttgtaatctcaggtgtctagcgttagttttaactctttgaagagcatttttggcacttcaattccaacagggtcatcttcctcacagttgagtactgaagaatttgatattaaaatctccacatatatatataggtacatgtgcgccagcatgccttttctttaaactaattctgaaacattttgaactactcaggacatgcagtggaaggagcatccaacccatcaaggccacagctaccgaa

SEQ ID NO: 52 - DNA, 3099 bp, Poplar sp.
ctgttaagaggaatgaagaagcgtgtggctgcaacaaatgaattggtccctctgatggctcaaagccaaagactctctttgaaagatgcctccacattcttcatcaaaattgattcagaggagcagcaaggaaaataaatggcttgagcttcgccaaatcataattttttcactgagacttatcaaacttaatcaatccccttgctagggacgttggtttcggaacactttattctcgtaatcaacgaccataatttgtctggccttttgaatattttaacttttgtttcggccaagggcttggcctctgaatattcatttattttggatcatgaacctaacttctataattttaccagcatttcttctgaacaattgtcatgttttagtagactttggtgagcaattcaccttgaatcaactgtaagttctgatggaataacaatctcgacacaaatgggctaaacttagcacaagttattcgtgaagttctacatatccagtgcttctcccggatgttcatgtcaaagccctcgggcgattctcgatcatcctcttgaaaatatttataattattttattaccggccggcctctgcttggtcggtcgcttgtgcatagtaaggtattgaagtgttccattctactatgcgtatgttcgcaacaaattcttttaactcttttgtccgcgaaaactaacccttaacgagagagtggtttgtggtattccaaatccatcgacaatatttttcttaataaaatttatttgctttaaccaatttagtaaataatcacataataaaagtatatcgttttcaggaaggacgataatttgtttcaatcgatgacccaacttttaaaagattatattttatttacagtatgattagaagtgttgttataattattttttaaaatattttttattcagaaatgtattaaaataatatttttttatttttaaaaattattttttatatcagtacatcaaaataatataaaaatacaaaaaaatattaatttgaaaaaaaatatattttattttattttttaaaaaatattttacaaatttaaaaacaaacagaatagtaccataagttatttactcctcggttattattttttttcttaattgccgagtatgcccccgaatatgtaaaatagtttttttcttttctttttgaaatgctatccatggtattgattgaaataaagatactcctcaaatacaccgacgcccgacacggcatcagatattaatataactcaatttttgtttttcaagtaattaaataatatattcattgattgtacattaaagaaatcgaagcaattgctaatagaactatagggaagaaaacacagcaagagtggaggagcaaagccgccccggtgggcccagaagaaaaatacaaaaaggccccagactggctgacgtggccttcgaggacttggccagggtttctcagctccgaaactacatgacagactcacctacgtgattcaccgtatttttttttattaaaaagatgttcatataaattatggatatttcaactaatttcatgaatttaaaaattaaaaattatataattttttagttgctattatattaacaatcacgtgatccaaacctgaaatcacaatgaaaataaacctcttgatcccaaactggtccggacacctatattattttgaatatttttgcaattattcaaggaaatattttcaaatcattaattgtttcaacattaacaagaatatatatattttcttatggttttttacttttttaaatatagatttattcaacgccttatatattgaatgagtaaagaaattagacataataattgtacctttaccaatgtttattgtatgtacattaagataaaataagaagttattttttttaatctaatttgctcactaaacgcaccatgacgactctacaaaattaattttaaaatacaacttggccatcaagtcaaatatattttgaaaataaaaatgtaatataaataaatttcactaaaaaacccacatattataagggaaaaaaaaaatacaaagagagctcacgccagaaacaatatgtctactcccatgttatcataactcacacgcggtttattgcatggagagagagagaaattcagagaaaaatacggtattttagaattaataacacatgttagaaaaacattaaaaaatattataatttaaaaaaatattatagtttaaaatatttaatgatcaagaaatgagatttaatattcaataataataataaaaaagttatcaaggatacatcgaagctctgttctttatttattcagtgttgtttgaaagatcttgacaagataaatctaaccacatcttaaaagatgatcaaatatagtcataatttgttaaaaattttattcgaggttaattcaagattaattataatattctctggtgttcttccaatatataactagaattgtttcgtcgagatatttttaaaagtaacgagtgtgttaaaaccaaagtttgtagtaacatatttttttttcttcttccatttatttctcctacaatatcacatcatttcatttttttcttgattattggatttttaatcttatattttgtttattgaaacttctttgattgacttttgctaaataatatgtaaaagaaaaatattttgaaatatccactaaatatattttgagatgcaatgttatttcaaatagtaattctctataaaaataatattttaaaatatagttgtttttaaattctcctattttttaagtattttttattttttttcaaaacttttaatatactatgctatttaaaaagaaaagattaaaaaaatcggtacaggaaaaagcgagccaagcacattcctcgtgagaaactccgcttaaagtttccgcttgttttattaaaaaaaaatacacattcgttttgtttttaaaacaccatcaaacaccacctgcctgcaactaccatttctttttcgatttttcattttcctctccctctcaaaagccgcaaacccaacctttgccttatcagtagggtttttgtgttgctcttagtacag

SEQ ID NO: 53 - DNA, 3035 bp, Poplar sp.
agatcctcagaatccaactcctgttacaattcaggcatttcctacacattacttgctcatggtttgagtcgttgtcattctttggtttgagtcgttgtcattcttggctcctcatctgtctagtcaattgtttggggtactttagcatatagagaccttagagaggcatcatttgctccatggttttgtggggacaaaaaacaaagaacactgcttgcactcaggatttaggttgcctattgacaaagggttcttcctaagtaaattcttgatttctcgtaaatgtctttttcttcgtagggatgacttgcaacgcttactcaagtagatttgtaattttcgctacctctcttcttaaattgtcaatttttctctgaggattcatttctaactgggcccttttttcgtgtttcacttgcttttctctgaggattcatttctaactgggcccttttttcgtgtttcatttgcttctctctgagtcttgtattgtagagtctgagagggaattggattcaggagggacatttattctacattctactactggagcaatttgcaaagaaaataagcaagagatgcaagaatgcatgatgatgggtgctaaaatgattgtattggatatggattttgtctgattctgccatggtatacggaaccgagatctggtaaactgccttgtagatccgtataaaattgaacctttaacgtgtattaatccatccattttgagaacaaaattaaagattttcattcaattaaaatgtgggaaatagcttaacacattatccatacattttatgaagttggtttaagactcccttcatccgaaatatggaatatcatttcaagccttaacccatatcacttgagaagaaaactttaaaattctattcatttgaaaattaggtaatttacatattctccaacatcaaaccattaaaatttaatccatccattttgagaataaaaattcaaaatttccattcaataaaaaatgtgggaaatgtgttgacgtattatccttgcattatgggcaagtagtttagaaatttcattcatctgaaaatataaaaatagcttaatgcattaactcgtagatatcaaaaataaaatttcaagattttcattcaaccaaaaataagaaaatatatgcaaaatgatctattaattcatcatataaattaactctctgtttcatgagtatgagtgtaaattgtggaatgttcttaaatagatcttgattatcttgttatctatctcatgaaatttcatacacgtcgagcttgtccaataatattataaggagacaccttagaggaaggttctaaccattacatgtagataggttaggtactaaccatgaccttgtagactttcaataaaaatcgaggtttcatgagttctagtccacaatgaaacccagtaggacaccggtaatttttttattgctagcttaaggcaatatgcgtgcaaaaaaaatagatgtagtaggagcaagggcataaattcatatctagacgaagcaaacatgaaatgcattcaaaacaaaataattgtatgaaaaaatcaaaaatcaaattaaacaatttagaaaaaaaaacaagtaaatattcagcatataaagcacaaaacatacattataatggaatcaaacaaacaaagtttattccttaaagtttctagtagagttatcataatggcatagaggacatcttagtaaagtaaagtagaggtaaaatagaaaataaggatatcatagtgtcacgcagagttttaaaacccggaccggtccggtgggtcgacccgggacccggccgacccgggcatgggaccggtccgggtggaggcaaaaacccgcttgggagttggcccggtgaaacccggtcgacccggagggtcgacccgggacccgggccacccggtcaaacccgcctaagacccggtctcttttttttatacttaatagacgttaatcgacgtcgttttgggcttgattttgcgccactgctattttcgatgataaagctgcaaatttgacacaaaaacaagagaatcacaaaagggttgttcttagtttcttgaaaaagtggataaacaagtgggtttctgtcaattaccttgtgatattgtaaaaagcgaagtgtacaacaagaagaagatagtggagagaggaagcttagagagtgccataactgaggaagaacttacgtttcaccacttcatctcctggttctggttcagctaaagattcttgcattatcttgtagggtcttgtggttctcttttaagtgaatcttttaggtaggttctggttgtttttggagtttgcttgctggcctcaagaacgaagaaagaatttcaaagaactccacttctgacaagagtgaatgatattgctggccaaatcttaataatagccccccaactatgtagctaataacaatttaacaaaagggggaaggactggaacaagaggaggagccttaggcccttatggtaacttcacctagggtgacgtggcgagttctggctggcattttcagtgagagagacgttagagaactagcccaccagacagcaccatctgtcttttttttataggttttttttgggttgacccgggttaacccgggtcaacccatctgacccgtgacccgatcacttgaccgaatcaataaccgaatcgggtttcaaaactatggtgtcacggagtctgtcattatgtcaaatattctcttccttccaagcttactaatttttgcattttcaaaaaaaaaatcttgtttttggagtccttaaccaattctaaaccgctggttatcgaaatcaacggtgcatgatccctccaattttaggaaattacgtggtcatcacgtaatcaccgcctcgacaagtccgctcaacctaaccgtttcttcttaagatcgcaagaatcgctccttaattccgttgtataatatttatatataaagaagagcaagcacctcactcaccatcacactacacttcatttcttcatcatcatcatcata

SEQ ID NO: 54 - DNA, 3090 bp, Poplar sp.
tttcctcttcttttttttcattttttcatttttttccaacttttcctttatttttttgtttatttttttttttcaaaattacttttcttttttttccaacattcctctttttctttttttttatttattttttttcaaaattatctttgttgattttactttttaaatgttgagctggttaaaaattttgctttgtaatttttttcctttaaaatactatagattgttacggtgttttcgcacatagtttttctattttatttttttattttttaaaattatatttgtcgattattttttatattgagctgactgaaaatttagttttgtaattttttcctttaaaacattgttgattgttacaatgtttctctgcgtggttttttttatttttgtttttttatgattttcttcgaaattatctttttttattttattttttaatattgagctggttaaaaattacagttacaatatgtgaggaaagcactgtaactttcctcgcaaattactgtggattgctacagtgttttttctcatatggtttttttttctgttttgttatgtttttttctaaaattatctttgtcaattttattttttaaatattaagctggttaagaattgcaattacaagtaaatacaagttttcctcacaaaacactatggattgatacagtttttcctcacatgatttttttccagtttcttttgtgttttctttttttgtaatatttttttctaaaattttcttcgtcaattttattttttttaatattgagttggttagaatttaactttgtaataaaacttaattatgtagggaaagcactatagttttcctcgcaaaacattgttgagaattacaattataagtcattacaaacaaggctaaatcatgtgggaaagcactgtagctttcattacaaaacactgtgaattgctagagtgttttcaacatgattttccttttttttgctatttttttttaaattgcctctgttgatttgattttttcaatattgggctgattaaaaatttagctttgtaatttttttttctttaaaacactgtgaattgttgtagtgttttcccatatgattttttatgatttttttcaaaattatctttgtcgatttttgtttaatattgagttggttaagaattataattataatgaagctaaatcatatgggaaaagcgttgcagattttctcacaaaacactatgaattgctacagtatttctctaaatggttttttattttattttatcggggaaagcattgtagttttcctcacaaaacattatcaattgctacagtgttttttttcataggtattttcattccaaaattatctttgttgatttttttttaatattaagttggtaaagaatttagctttataattctttttgctttttattaacagaaaatctaaatcatgtggtgaaaacactgtgtctttcctcccaaaacactgtgaattgctacagatcattttgttaagtctctaagttttttatcaccaatataactttttttccatcataaaatattaattctatcatacttttaatttttattatttatctaatactgatacataattataacattattaatacttgtgtttataaattcatggcaacatgcgcgcatgccatctcatgataataaaatacaggagttcttaaggtacattggttttgccacttgcatgacgttgggtttctgctcagaacgctggctgacctgttgccaagaatctttgtgagcatgccatggcccaaattgaatataacccgagttatatatatatatatatatatatatatgggtttgaccaataaacaatttcttcgcaaatgtttaaaagaattataattatctccttttaggatctctgttatgctagtttgaaaatgtaattgtgattattttttaaaaaaattttatttaaaaatatattaaaataatatttttttttatttttttaaaattatttttgacatcagcacatcaaaatgatttgaaaacattaaaaaaatattaatttgaaataaaaaaataaaaaaattttatttttttttaaaatgcttttaaaatacaaaaacaaatcaaatctaaacactaatactttcattaaattggtataagtcacggcaactttcactcaatagatctttcatgtttttatatataaaaaaatttagacactaatactaacttgattttataattaagttatttcttatattaatttcaacttaaaactgttttaattcgtcgtcaatgacttctgttaaaatcatccaacaagaattattattattattattattatttaaaataatgttgtttctgttttaaaaagtataattttggtaaaaaaaatataaaagttttaaaaaattcacataaaagttcttaattatactcttttaatttaaaagtgaaattaaaaaaaaatcatttgacaataaaatcgaaaggtgggtatttttgagatctacttttcaagtttctagcaaccggaaaaccgtgaaacttgtgtggcagcaaattcaggcttgacctcgcaggctgctgatgtcagcagagagctcatgcaaccagtccacgacaagaaccttccgttgctgggcccaacaactttgagcccatcggacatactccgaatattcccacttccagaacattaagactcccacggtcattaaggaaagtgcgctataccttcctctcacgcctctccctcatagataaacaaccagtcaaccacccaagactgaatccaaatgccacaaaatcgcgtgaatttcctttttaaaatcagcggctaatacaagggcttttcaaaattccaatcagcggcttaaaaccaagctaattgtttctttcgttttgcccaagaaaaacaaaaccgctcacgtgacctaacccgtcaccacgcacctactcttctttatatgaccctcaattagcagccactctcctcactaaaattatctctgtttaagcttatctctcaaatctcccctcttaattctaaatctctcctctgtgtcccgttactatcaacaaca

SEQ ID NO: 55 - DNA, 3079 bp, Poplar sp.
gagttccaagaaacagaggtctgttgcacggtcttccaccgaagctgagtatagggccattgctacaacagctgcagaacttgcatggattcaatctttcctgacagaactccaatttcctctctcatgcataccggttatatatagtgataacattggtgctaattatgtttgtggcaacccagtgtttcactctcgcatgaagcatattgctattgattttcactttgtttgtgacaaagtggctcacggttctctacgtgtctcccatgtcgctactgctgataagcttgccgatgctctaacaaagtctctgtccagacaacgtctctcctttctactgtccaagattggtatctccaatgggagctccatcttgcgggggcgtgtaaaggatatacaccatccactcaatacaagttgactagttcagcttgtaaaccggcaacaataattcaaaagagttaattatcctttatccttagctgatgtaacaaaccttgtaatctacagacatgtattaatttataaaaataacctaaatttatttataaagtgttttttttaaaaaaaaaattatatatttagattatttttatatattaatatcaaaaataaattttaaaaaataaaaaatatattattttaatatattttcaagcgaaaaacactttgcaaaacacgctatcacactatcaaacattatcttaatttataaaaataacctaactttatttataaaaagaattatataattataaacttttggcgataattctgtgagcataaaatttcttttgataaattaataagttaataaaaatcacgtcataaatcacggggaaaaaagtcatggaaagattttatgagtccaggtttgctagcttcctcttcaaaatgcgcacgcacacaccgtcgatcatactgcctcaccgggccatggatcgaccccaagcccgcttaggtccatgaccttatgggccttcaccgtacattgatgtagagtggaaagaaatcaggcggtccacatatcatccacctagattctcgtgcccgtcaaaaattgacgtggcccatgatatagtccacaaatagtgacgtggccaccaatcacccctcagctttttcttaatggacataaacaaaagtcgttcccttggaaacatgacaccactcctgtaccacttgactttttgttatcgacaacagccgctttgaagatcacgttatcttcactcagatcaacggctaaaattaacctcaacgtctcactatacctaacaatcaaatctaaccgtgtataaaaacaagatcagcatgacccattaaagacatggatctcatgagagtttgaccaaactcatcctcccatttttaaatttggtcaaatagatccacgtacttcatttgttttttcaatttgaacccttaacgttaaatttaaattcaaatcaattcttctagctaaatagttactaaaacaattaaaagacatgagattgataatagtgaaaaaggttgatattattttaattgcttagttaatatattcatgtcgtagctatactttttgctcaagataaggtcgtggattcgatcaatattaagagactaatcttttttatttatagatgattaggttaattcgttagtttaattttttagttaacaaatccgtgtaatagcataatggttaccacatgtgatttaaggtgaagttaaatgtttggtccatgttattagtaaaaaaaaaaaatttaatcatatcatttaatataatttatttatttatttttatcattatatattttttatcttttactccccatcattctaatatgaggtttttaactgttttttttattttatattttaatataagatttttatttaattttatcttgtagtgttaagttgattttttctttgaacttgctcaataaataaggttatgatgaaaaaactcccatataatttaatttaaaattcatattaattaaatagtcagatttgaatttttcaagtttaaactattataccaatatcacaacaacaccaaaaaaattcaataatatagatattatttttttatttaattttttttaatctaaaccacaacgagaacatggtaaatttaaaaatagctttaatttgaggacacaaatttgttaatgaaggaacctgtatagaatggaatagataacattctaatacaatgttttgcaactcttttatttcgataaaaaaaaatggctagagtttacatatcatatgtacagtagcaaaaattataacttatagtttacattaattcattctaagtgatttatgctttagaatacaataacacattgacacatacacttatataaaataaacacatagaaacttaattatcaacaaaactatattaagtatgaataaatcagacttaataccatcagattttgttagagatagaaaatatatatctgaagcatagtttttaaatcccaacttaaggtcatggtcacaagtcttgaccggatcattctaagtcaatttccaatattttttataaataaaatgatattatttttattttaaaaaataaataatcaataagttgtaattaaatttttgatcaggctgggttacctggtcatccagcttttttaccaagtcattcaagttttatttttttttatttttttttaaattcagcttttcagcctgattttgaccctgatgaactcaagctgtgttctaaaactaccatataaagtaatataaaatctctttcaatttattcctgtgcacttggaatgtaaaagcctaaaaggtggccaactctccttggaggaactaatttaacaaaaagaaaacatatatattgagtttaataaatcccaaaactcaagggatcacaactgaatttagtcaacagtcaccggctacttcgggacctcgggtacccggttggctctctttttatacttgcaagagagcctcgctcctatcgcccactacctcacttgtatctcctcactgactccaactctcatactgtttctcagcgtgtctcggcttctctagaatc

SEQ ID NO: 56 - DNA, 3085 bp, Poplar sp.
aaaaattatgtaagtttcttaactttccattcaaattgcaaacacaaatataaatatcacgccccgtttgtttgcaggaaagttgtttccttttagaaagtgaattccggaaaagtgaatttcaggaaagtgaattatttttcgatgtttggtagtataattgaaaataaattggaaaacattttccagtgtttggttatgttatgaaaaatgagctggaaaataacttattaatgttttattttttcaagtttattaaaataatgaggaacaaatcttacaaattaaaaagttgaatgaggatgaaattgaaaaaaaatataatttcataaattatcttaaataaaataaataataatcaaaataatagagatcaaatctaaaaaataaaaaaaatgaaagatgaagaaattaaaataataataattagcatttcataaattatttttttaaaaaaagtaacaatcaaaagaatgaggaccaaatttgatagataaaaaatttcaataaaaaaatgataaggaaaaagcaaataacaattataaaaataaagaccaaagttaatataaaaattaaattttaagagatgaaattgaaaaataaatattcaaaacaaaatatatatagcaatcaaaagtccgaggaccaaatttaatataatcagcaaataatatgacatttctaaatttttcacaacttccggaaagtgttttccgtccaaatttttcaggaaaatactttcctggaaaccaagccaaattttcctttgactgaaaagtgttttccgttgatcaatttttctaatggcaaacaaacacaagaaagtttggaaagtggtttcccggaaaccactttctggaaaacaaacatagccttaattggatatatttctctgggatttatgctcaggtttttttttcactgttttttaattaaaaaataatgaaatttatttcctgatgacaaaaaataacaggccgtggatcttttctgattgggagtgtggttgtggttgtttttcaaagtgcttttcatttagaaatgtatcaaaataatattttttatttttttaaaatatttttaatatcagtatgttaaaatgatttgaaaatatcaaaaattattaattcaaaaaaaataaaaaaataattttttttttaaaatatttttgaaatacaaaatcaagtgattaaacatagatacttgtgccatcaaaagtgacgtggccaccaatcagccctcagctttttcttcacggatataaacaaccctaggaaataccaccactaccatcctactttacttttcacaatcgacaacagaccactctataaatatcacgctatcttcacacaaatcaaacggccacaaatatgccgcagcttcgcactctaccccaccatcaaatcaaaccgtctattaaacaagatcagcatgacacattaaataagaccggcatctcacaaaagtcggacgacaatcgtccttacattttaagtttggtcaaataaatccttttacttcatttagttttcaaattgaatccaattcctctagataaactcgtgttcatgaaaaattgttgccatgtgatcacacattaagtaatactctaaaaggcgtggggaaactactgtagcttccccacgcctttcacttattaatatattatattattataattattatattatattatattacagaactgttttttttttgtttttaatttttttttgtttttttttaatgaattttttttgtttgatttagtttgttaatatgataaaatttttttaatgaaaatctaataactaatttttgaagattttcatgatacggatcccgggtttgatgggttaacctgatttgacgagttaatccagattttttttttatttttaattaatttttttatttagtttagtttgttaatgttaaatttctttctatttaattatcagactttcatgacacgtatcctgggcttgacgagttaacttggtttgatgggttaacccggttaattatgggtaaacccgtcaatttttttttctatttagttatcaaactttcatgacgcgaatcccaggttttacgggttaacccaattaattcagatttttttttctttagtttttttcttcctgttggttttttttttttaattaatctatttaattatcatacttttatgacacgaccttatagccagacccacatccaatattcttgggtccggtgttgcagccagacttacttaaacttgggtcatgcaagtttaatgttattattaatattataaatattatttttaggtcaggcgttgcagccaaacccaagatttttgggtatagctttgcagaaaaacctaacacttttaaattttaatttctttttatattttttatgcaaaaaaaaatccgtcgggagggtcatgtaactagtgtaattatataaatggatgaaagactccatgggatccgtttagtttgggaaagttgtggctgtggcttttgattatattccaaagctacaaattataaaaatatctttaaaatcataagcgtgatattattttttaagtattattaaatgcttgtttcgcagctaaaaatatcttaaaaatcataagcgtgatattattttttaagtattattaaatgcttattttataatataataaacattatattttaaagtattttttgtataaaaatatattattttattttttaaaatttatttttaacatcaacaatcaaaattataaaaaaatattttaaaatttttaattttaaataaaaaaattaagcaaataaatcttttttttcggagttaaaaaataattttataaaaatttaagtttttatattttaaattaatttttttatattattttgatgtatatcaaaaataaattgttttttaaaaaatattttaatatattttaaaaaacacagagaagacgctgtacttctggttggcttcctttaaatatccacagcactaaattttcacttctatcctcactaatctctccactgcttcctgcttttactcctactgtttatctctgtgaatc

SEQ ID NO: 57 - DNA, 3049 bp, Poplar sp.
aatatcaaaaaataattttttgataaacacaattttaaataaacggagcaaaaaaaaacactgtgctgactattcttcttgttctgaagaattgtttatgtgtcaaaagaggccttaaaaagtttagtttttaaaaatttagggtttgttgagttgagctttgcataactcaaatagaatataacctgagttcaagatataatcctaaggtggatcatcaactaccaataaacaatttatcgcttttttaatcaatcaattcgcaaatgtttaaaagaatttaaagtctccgtttagcagaataatgaaataattctttttattggataattttcaactttctcttgaaaaattggtagcttatcgtctaatttctaaaataaaatttatgaggattcattttggaaaaaaatatataaaaagaggggaggggggatgtttgatttgaacttattgcaatgttttaataacgacgacaaagacaagaaatatgcctcgtgtgtgtgagctcagacaccgcgcgtgtgtttgtgatttttttatttatagtggagtgtgtttcttaaactattggtctcgtgaatcaatatttgtctgataatgaaaaataaatcttgagcctacgttactcattataagtttccaatacattattatatctcatttatagtgggtggggcttgtgtcgatattccatatgcttagacatgatagaatatcaagtttggatgatataagtctagtttatttttagaaccaatacttctaaacatggctatgagtaaagcccatgtgagaataggtctgatgagttatcagacctagtacccctaagcctgggtgcgtgccaagcccaagcaaacaaagatttgacaagctgtcagactcatcattcttgtacattggcattgtatcgagcccaagtgggtgtgagtcctcacaagttgtcacacctagcatttttgtgtgtgattgcacgctgagtctaattggacatgtgtttaacgatttgttagaccatctcttttaggcttggctgtgcgccaagcccaatcgggtaaggttccgacgaccttctcgacccgtcaacttaaggaatggttgtgtgccaagcctagttggacatgggtacgacgtgctatcagacctaacatccttgaattcggtcaagtgccaagtttaactgagcaaaggtttgactcgctgtcatacccattgcccgagggcttaactttgtgccaagcacgaagggataaaaagacctggaaatcattatagactccatgttaggccaccaagctcaatttacttattcttatgatttttttaatataaaatgctaatatcatgggtatttgcctctcatccctcgttaatattaatgttatgagtatctcattccctattaatattagtgttagggatatctcaactcatattaatgttaatgttatagatatttatcacactaagtgttgcaatggtagaaagacctcttaaactcttaagaaatatcttttgtacatggtattaagagtataaatactccaaaatcacacaggcaaagagtttatgatctttattcttaataaaaaatacattcttaattttatagcatttactgcatcaaaactaagaataaacacttttgttcttaagaataaatgcttattttttttatttattataataatttgcttaaaggttaataattttatcatgtgaggattccaaactcatagggattgctttgtaaattatatgttctttacataaagctacaagttcctaagcaatgaaaaataaattattttgctaaaacttgtgattaacacacaatacaacccctaaaaaacttattcatgattttggaatattatccattgtaatttttacttgttaaatattttatattttttataggagttaattattttatatttaattgtgtattaaatgataaaaataattcaatatttacatgaacttgatatttattattttatttcttatttatcattaaatactgtatcatgtttatttatatgaaatactcaaacccgctttattgacatttctaacacgtgttcatagataaagtaatttttctttggatgtaaaaaaaagtcaacaaatatttatttcgaatcaccgagattgtcctccgaatcatgttagtaaattccaacttgtttacccagtcaccacgcaagctgaggctcgtgaaagctgatatcagcaaccagcagaaagctccagctgtccacgaccagaactatcttttcatcgggggccgccatatttgagccgccagacatcactccgaacagtcccgtctagaacactaaaactcccactctcatcaagggatgtgcaatacacctccctcctgaaccacgtctctcataattaaccaaccactcaaaactaacttcagacagcacaaatcgcgtgaagttactttcgtgccgcccacaacaaagagaggaggaggtgttcgctattgttttctaaagtgcagagaaagtattaaaatagtataatttttaattttttaaaatttattttaatatcaacttatttaaaaaattcaaaaaattcaaaaaaatcaatttttaataaaaaaataagttgaaattcagaagaagaagaagaagatgaagaagaaaccgttaacgtaacgtaaacgcaactctctcatgtacctttaaagctctgtttctagtaaaatctctcatctgttttccgtttctactaacggcaatgggtaagaacaatgccctcttcaccccgcaatttctcgtttgattttctcatgttgttttaattttcattttcattttctctggatttaatttctttttttctttaacacagcagcatccgacaagaagattaagatcggtatcaacggtatttttcttcatctttctgacatgttttgatttctttttaacatgcattaatttattaaacattaaataaaataaaatgtggataggatttggaaggatcggtcgtttggttgcaagaattgctcttcgaagag

SEQ ID NO: 58 - DNA, 3000 bp, Poplar sp.
ctagttttttagtagctattattatatgttcgtattccgcagcgggtcaatatcaatttttttaaaatgtaaagaatatattaagaatatagagaatgttttaagagtcttgagtctgacagtcatgccagacccatgagatttggatctagcagccacactaaattcaagcgtcttaggtttgacagcctagcaagacccaagtgccttggatcttgcagccatgcaagacccaagcgccttgggtctacttgggtctgatagccatgtcagacccaatcgccttgtgtagttttgtttaggtgtgtctaggctcgggttcaggtctatttaatttttttatatatataaatttcatgtggattaggtgtagtgcttaccagaatctgagcagatgatgattaaaatgttgagacttataatttttgtattttttatatataaaaaaaacaatcaattatcctttaagtatcataaaccgaattccaagctaaaatattatttataaacaacaaatcatcataaaaatctaatttattagatctaaaaattcaaatcatatcttcctattgaaattgttcattttttatgttcatgaatttgttattgcttcaacagaaattatttctcttttttttatgaatttttttatatttttttaatcaaactcaatgcaaaaaaaatgtttatttaatgggtggtcgtttgtgatttttcactaaccacaatattattttatattttttaacaccactggactatatgtatttagtttcattatacaatttatttagttttttaagtgattcttctgcctactttatgacatctattgctatattaaagagtccatcatttcatcgcacgatgttagaaagaaaagatatggagccctcttgaatggaagacttaacaaatctagaagaaaagatatggttgtcatatctagatgcgggtctggcatacctaggcacgaatctagcatggttgtcaagcccggacgcgtacgtccagacccaagcgacttgaatctagcaaccatgctagatctgagcgccttggatcttgcaaactatgccagacccaatgtgtgtgagtctagcagtcacaccagacctaagatacttaagtatggtaagcatgtctgatttgacaaataataaacaaagatgacaattgtgcattatagttgtcaggagagagaaaagaaagaaaaaacgcaaacaatcgatcaccaaaggcaatctaaccattatctgtctacatgtgccacaccatgtggaagagagcttgaatttgcatctaatgagacagcggatggctagatttggccaccgagaagcatcacacgcacctctttaatggcgtgggtgccacccactcgctggggaagaaaaagaaagccaaagatatgtcttgtgtgaaaagatgagaaattaaaagtgaaactactattacaattcacggttaaatgtctcttgatctatagtgattttcccacacaatttagcttttgttataatatcacgggacaaataatttatcttatagcaaaaaaaaaaaaaaacatgcaagcttttctaacatgtttttttatacaaaaaaaataatcataattataaataaaaaaagcctacgcatgcatttaattaaataaatcgagaattatttatgctaataaatgcaaaaaaaatgttaaggtatctattagactcactttactgcaagtcgaatatttttttataacacaaaagaataaatgtgtaagtgtattttctgacatcgagtaaaaattataactttgaattaaaaagttgatgcctacgtataaaaaataaagtgaagatcatatgcgttgctaaagacgtgtaacatctcaagcaagtttttacttagtaaaaaaatgagataatgctgcaatttgtatggtgaaatatcattttcttagtatttgtataataagttttttttaaaaaaaagtgtaaagggagaaaaagaaaaaaatacaaaagaatgaagataagaataaaaagaattacataaatatatcaagtgtagagtgataaatatttcaagtgtaaagaatacaaaaaatattttttcttccaaaaaaagaaggaaaaactaaaaaataaatattataaaagaatgaagataagaacaaaaaaatggtgataaataggcaaagtgtaaagtgaaaaatatgtcaaatataaaaaagaaaaaagaaaaaggggaaaaatctagaaattattttttctaaaataacagattatagatttgtcattgctttagtaacaacattgaaaaaaaattatagttatgtcatttctacagtaaaagattttaacgaggtagaaaaattagcctaacagatttagtttggttgggtttagtttagtttagtttttgtttttttttttggtttctcaaatctaaaacagaaaaatgagccaaacagattttctttaaattttctatgaagtattttcaatttaatatctcatataggttttttcaattaattttatatcatattttcgaccatatcgattattttgtccactccctctcaacaaaggtcgaagttccgtgctgcacaaccctagccattcccatctcttcatacggtcacttcaatattagagtacaagaaaaatgagatcatggaagcttgaactcaagatacctttcccacagtaccaatcaattactccaaaaacaactccaaacgtcttctaagccacgtagaattaaggctagtcacatcctccagcatcacctagaaagaagctggttacagaactgtgcctataaaaccccattgcgctgttttgaatttgtagagccaataaaagaacactcacttacaaggctgtagacgcatatactcttatacgtaccatggccgcaaaaaaatgcagtattcatatatttctgccatttctccttattttagccacaaaaatagtctgtcgtcctcttgatgagcaggaatat

SEQ ID NO: 59 - DNA, 3151 bp, Poplar sp.
gaaagttattttgtttttaaattagtgcatgctcttcttttgaaagaaaaaaaatattttgacatataattagataaaaaaatttgtcagaattccctacaacaacatgagattaaatatcttaatctatatttatctcttaactttttaacttagtcttagattaaaattaacagatttttagtatttattgacatataattctcgatcaattttgttaaatatatgcaccaagttttatataaaaacttttgatatgacctatggtgaaatgcaggtaaactgacaagtagaaactaaaattaatagaacttaattaacaaaaactacaactctttggaaaaaaaaaacattgttcacctagattcaagggccatgttcgttggaacaatgtaataacgattttgctcttttcataaaaaataattgaactagctattggcggttgtgaggtctttgcataaggtccattagttattatcaaattgttcggggcgcaagtagatcgttttccattttaaaagcacagtgaaacaactaaaatattcaaggaagcaaaacttttggaggtggcgtctaagggcattttcatcttttcacactagtattttggtgatggttatgttggataaggggcaatttggtattttaatacatgtaaaatataattaaaaaaaacgtaaccggcacatgcaaggcactcatcaacgcgtcctggaggcaaaaaaaatccggttttgtccttttgtatttaattaatttggaattaaagtacattgtgtttttctttttgaaaaaggttttttgttgcccgattatcacaattactttttttttggtctatttaatatcattgtttttttttaaaaaaaaatttaattaaaataaaatcaacttatttgatttagttgattctacgagctcaacattatttattttttatacgagaagaaatggccctgcggtgtaaagtgggttgttgagctagtgttttagctaaagcatcaatttaagcaaccttgaagtttcgcaataaagttttcttccttggaatgattgtgaaatcaatggaaattaagttatgatccaatcaatatcacaaataaaaattattgcatgcatatttcaattatttggatgaagctgtgccgaggctgttgtaaatggaatcttaatttcatcgacaaaaataaaggaatccaaacttattgattagtacagtgcttgaaacgaaatcaaaagcctttgccgtgatttgctctaccagtgttgtcttcggcattggtcgttaaaaaaatcatcccacgtatcggttggttcgtctcggttttaattaaaaaattaaataaattaaggagatggaatcttcccccattccattaattattgacagtcatggttcgatcgttgatcacacgtacacggtacactggcaagaagaagaagatgatggaagttctaaccaatgggatgtgttggtctgttcctttatcaaaatctaagccccaaatttccactgagcttcttgactcctgtggttggacccctaggacccttccttggttgccgtgatttgctctcttctagtacttttttttttttagatctcatctaaatcttgattcatttgttccttgtccacacaagacggtgattatgcaagtttgatgcttgattttgtaacgagcatgcgtgattaatgtttttgacacgttaatatacatgcagtcatgcttttttatttattaacaattctactgaaattttagaaaagtttcctttatatgtagacgtacaaagttattaactactccttccatatcacaagttattatcacaaacatggtctagttggtctaatttctattacccgagtcgcgggtttggaaagttaatgctcattggcattgtttttttttatataactaattttcctttttgataccatcatttgacatttttttatatatatataaaaaacaggctttgtaattctctttgttttcttttcttttgggttatcattatttcattaactgagctgcaggtttgacaggttaactcgggttgactcggtcatgccataaaaatttaatattaaataaaagctaaaagagtaataaatcaaatttcatacacttaaatcttgaattatatatataatttttcttctaaacatgtatgaaagttagagcacccatcctttttatccaactctatataaaatttcatgaacaatagttataaatttcagaataataacacatcaagatattcgtactcgacgtgagaaaggtcttactctcaatttcaacttaattagtgtatttggatttacatagttatgaaatatttgataatgatttgttattgacctttaatttatcaaaaacaacttaataatgatagttgttcacacgtatgtacacgggcaagaagaagaagatgatggaatcttcccccatcttatttcaccagtgattttccgtcagcaagtttttttaacatgttattttataaaacaattatgaaaaaataaagaaaagaacaaaaaaaatgacataaatagactaagtatagggtgataaatatttccaagtgtaaaaaataaaaagaaaattttcaaaacaagtataaagaaaaaaaagttagccaacaaagataatttgttttttttttttacttttattttaaaaaatgcagtttggtttggtttaggtttctcaaatcaaaaacagaaaaatgagccaaacagattttctttaatttttctattaagaaaaatattgagatcatggaagtttgaactccgaatcttgatgctacacttatattttaaattaattggcgcacatattactccaaatttgacttcaaagctccaaacgtcttctatgccccaaacgtagaattaaggctagtcacatagaaagaagctggttacaaaactgggtctataaaaccccattgcgcttgttttgaatttgttgtgccaataaaaaaacactcacttacaaggctgtagacgcatatactcttatacgtaccatggccgcaaaaaaatgcaatactcgtatttttctgccatttctccttattttagctgcatgggcaacaaatagcttgtcgtcctcttgatgagcaggaatat

SEQ ID NO: 60 - DNA, 3000 bp, Poplar sp.
cgacactttctttctttttccctcttttctcttatctcctcccctcaaaattcatgctagccatgcaaaattttggagtggtcctttttttattaagattttaaatttgaccattttgtaaaattttgatttgtttcaatttcatctttcaatccaaatttatgatatatttttttttcattttaattctcattcttttgatttgatttttctccttttgttaaattaatttttcttttaaatttcacccttcaataaaaaaaaactagtttccctctaatttatttatttttatttcaatgttgaacttaattcttttaattgcaattttttgttttatatccttttgtataattgatttttttcataatttcatccctcaacattcgattggttgggcgttgaaactcatggtttttctaggtggagtgtttccggtctaataacctgcattgcggctttggaaagttaatgcgcattgacattaatttttttataactatttttttttttttttgggttatcattgtctcatgacctgggctgcgagtttagcaggttaacccgggttgactcggttttttttatatagccattattttaaagaaattttaattttttttcagtcatgtctttcaaaatccggttttctccttttgtatttaattagttgggaattgaagtacattgtgttttcctttttgaaaaaggttttttgttgcccgattatcacaattacctttttttggtctatttaatatcattgctttttttaaaaaaaaaaatttaattaaaataaaatcaacttatttgattcagttgattctacaagctcaacattatttattttttatacgagaagaaatggccctgcggtgtaaagtgggttgttgagctagtgttttagctaaagcatcaatttaagcaaccttgaagtttcgcaataaagttttcttccttggaatgattgtgaaatcaatggaaattaagttatgatccaatcaatatcacaaataaaaattattgcatgcatatttcaattatttggatgaagctgtgccgaggctgttgtaaatggaatcttaatttcatcgacaaaaataaaggaatccaaacttattgattagtacagtgcttgaaacgaaatcaaaagcctttgccgtgatttgctctaccagtgttgtcttcggcattggtcgttaaaaaaatcatcccacgtatcggttggttcgtctcggttttaattaaaaaattaaataaattaaggagatggaatcttcccccattccattaattattgacagtcatggttcgatcgttgatcacacgtccacggtacactggcaagaagaagaagatgatggaagttctaaccaatgggatgtgttggtctgttcctttatcaaaatctaagccccaaatttccactgagcttcttgactcctgtggttggacccctaggacccttccttggttgccgtgatttgctctcttctagtactttttttttagatctcatctaaatcttgattcatttgttccttgtccacacaagacggtgattatgcaagtttgatgcttgattttgtaacgagcatgcgtgattaatgtttttgacacgttaatatacatgcagtcatgcttttttatttattaacaattctactgaaattttagaaaaattttctttatatgtagacgtaaaaagttattaactactccttccatatcacaagttattattacaaacatggtctagttggtctagtttctattatccgagtcgcgggtttggaaagttaatgcttattggcattgtttttttttttatataactaattttcctttttgataccatcatttgacatttatatatatatatatatatatatatatatatatatatatatatatatatatataaagcaggctttgtaattctctttgttttcttttcttttgggttatcattatttcattaactgagttgcaggtttgacaggttaactcgggttgactcggtcataacacaaaaatttaatattaaataaaagctaaaagagtaataaatcaaatttcatacacttaaatcttgaattatatatatataatttttcttctaaacatgtatgaaagttagagcacccatcttttttatccaactctatataaaatttcatgaacaatagttataaatttcagaataataacacatcaagatattcgtactcgacgtgaggaaggtcttactctcaatttcaacttaattagtgtatttggatttacatagttatgaaatatttgataacgatttgttattgacctttaatttatcaaaaacaacttaataatgatagttgatcacacgtatgtacacgggcaagaagaagaagatgatggaatcttcccccatcttatttcaccagtgattttccgtcagcaagtttttttaacatgttattttataaaacaattatgaaaaaataaagaaaagaacaaaaaaaaattgacataaatagactaagtatagggtgataaatatttctaagtgtaaaaaataaaaagaaaattttcaaaacaagtataaagaaaaaaaagttagccagcaaagataatttgtttttttatttattaattttattttaaaaaatgccgtttggtttggtttaggtttctcaaatcaaaaacagaaaaatgagccaaacagattttctttaatttttctattaagaaaaatattgagatcatggaagtttgaactccgaatcttgatgctacacttatattttaaattaattggcgcacatattactccaaatttgacttcaaagctccaaacgtcttctatgccccaaacgtagaattaaggctagtcacatagaaagaagctggttacaaaactgggtctataaaaccccattgcgcttgttttgaatttgttgtgccaataaaaaaacactcacttacaaggctgtagacgcatatactcttatacgtacc

SEQ ID NO: 61 - DNA, 3000 bp, Poplar sp.
atggttatgttggataaggggcaatttggtattttaatacatgtaaaatataattaaaaaaacgtaaccggagcatgcaaggcactcatcaacgcgtcctggaggcaaaaaaaatgctcttttattgtgtcgttaaaatcctcgcagcttcctcttcctattagagcagtgcccgtagtcgttggtgaggtggttttttgttggcgacactttctttctttttccctcttttctcttatctcctcccctcaaaattcatgctagccatgcaaaattttggagtggtcctttttttattaagattttaaatttgaccattttgtaaaattttgatttgtttcaatttcatctttcaatccaaatttatgatatatttttttttcaatttaattctcattcttttgatttgattttgctccttttgttaaattaatttttcttttaaatttcacccttcaataaaaaaaaactagtttccctctaatttatttatttttatttcaatgttgaacttaattcttttaattgcaattttttgttttatatccttttgtataattgatttttttcataattccatccctcaatattcgattggttgggcgttgaaactcatggtttttctaggtggagtgtttccggtctaataacctgcattgcggctttggaaagttaatgcgcattgacattaatttttttataactaattttcttttttttttgggttatcattgtctcatgacctgggctgcgagtttagcaggttaacccgggttgactcggttttttttatatagccattattttaaagaaattttaattttttttcagtcatgtctttcaaaatccggttttctccttttgtatttaattagttgggaattgaagtacattgtgttttcctttttgaaaaaggttttttgttgcccgattatcacaattacctttttttggtctatttaatatcattgcttttttttaaaaaaaaaatttaattaaaataaaatcaacttatttgattcagttgattctacgagctcaacattatttattttttatacgagaagaaatggccctgcggtgtaaagtgggttgttgagctagtgttttagctaaagcatcaatttaagcaaccttgaagtttcgcaataaagttttcttccttggaatgattgtgaaatcaatggaaattaagttatgatccaatcaatatcacaaataaaaattattgcatgcatatttcaattatttggatgaagctgtgccgaggctgttgtaaatggaatcttaatttcatcgacaaaaataaaggaatccaaacttattgattagtacagtgcttgaaacgaaatcaaaagcctttgccgtgatttgctctaccagtgttgtcttcggcattggtcgttaaaaaaatcatcccacgtatcggttggttcgtctcggttttaattaaaaaattaaataaattaaggagatggaatcttcccccattccattaattattgacagtcatggttcgatcgttgatcacacgtccacggtacactggcaagaagaagaagatgatggaagttctaaccaatgggatgtgttggttattatatgtagacgtacaaagttattaactactccttccatatcacaagttattatcacaaacatgatctagttggtctaatttctattacccgagtcgcgggtttggaaagttaatgctcattggcattgtttttttttatataactaattttcctttttgataccatcatttgacatttttttttatatatataaaaaacaggctttgtaattctctttgttttcttttcttttgggttatcattatttcattaactgagctgcaggtttgacaggttaactcgggttgactcggtcatgccataaaaatttaatattaaataaaagctaaaagagtaataaatcaaatttcatacacttaaatcttgaattatatatataatttttcttctaaacatgtatgaaagttagagtacccatcctttttatctaactctatataaaatttcatgaacaatagttataaatttcagaataataacacatcaagatattcgtactcgacgtgaggaaggtcttactctcaatttcaacttaattagtgtatttggatttacatagttatgaaatatttgataaagatttgttattgacctttaatttatcaaaaacaacttaataatgatagttgatcacatgtatgtacatgggcaaaaagaagaagatgatggaatcttcccccatcttatttcaccagtgattttccgtcagcaagtttttttaacatgttattttataaaacaattatgaaaaaataaagaaaagaacaaaaaaaaaatgacataaatagactaagtatagggtgataaatatttccaagtgtaaaaaataaaaagaaaattttcaaaacaagtataaagaaaaaaaagttagctagcaaagataatttgttttttttaaaattttattttaaaaaatgccgtttggtttggtttaggtttctcaaatcaaaaacagaaaaatgagccaaacagattttctttaatttttctattaagtattttcaatttaatatttttctattaagaaaaatattgagatcatggaagtttgaactccgaatcttgatgctacacttatattttaaattaattggcgcacatattactccaaatttgacttcaaagctccaaacgtcttctatgccccaaacgtagaattaaggctagtcacatagaaagaagctggttacaaaactgggtctataaaaccccattgcgcttgttttgaatttgttgtgccaataaaaaaacactcacttacaaggctgtagacgcatatactcttatacgtaccatggccgcaaaaaaatgcaatactcgtatttttgtgccatttctccttattttagctgcatgggcaacaaaaatagcttgtcgtcctcttgatgagcaggaatat

SEQ ID NO: 62 - DNA, 3000 bp, Poplar sp.
aaatacgacatctcaatgtaagtttgttttgctttgagttggtttacatttaacaatttatgaacaaataatattttattaaatttatcaatttgcaggttcacaaacattgaggttgcccgaataataacatcagcatttaaatcatcgatggaaattctattatttcaatgaagccaggttttcaaatatcctgaatggaaactgcaggtcgatgcatagtttacaagatttaagattagttttaatttaaaatttttagtatttattatgttaattcatttactttattgaaaaattatttatttttttttttataaatttttactgcaaggctaaatttgagtgggatagagcaaatgataatgtaacgaggagggtttgagagaattatgttgtaactaggtaacataaaaaatagtacgactttttttttaatttcacatattaaaatttcatttgtcatttactcacatataatatatttgtattatataggttgcgtgatttttggtatgaagcaaatttttttttttaaaaatatgccagagaaagcgctttagcaggttggaatgacgtgacgattggaaaggattttaggctgccatacatcctggagaatatatgggtgaaatatattcagcacgtgatgtccgagcgtttcacactatgcatacattttggtgtggggaaccggagtcggtaaattcacggttcggttacaacgcacactagcagcttcgttccatttgtttcacatgcgaagcgtaagatttattttaatcatatttatttttaattaattttttgttatttataaacatatttaactgaaaacattttttttcttacaggctacgtcacttagaagtgagctaagcccaatggagctttttatagagacgcacgtgcagagtgaagaccgccaaaaaagggtgtagcagttcgtcgacaaccgagctcaacactttgcggtacattggttttcaaccattttatttcttaagttattattttcttgaatttgatgatttcatttttttatttctaggagacatgtaatagccggttgaaggagagatatgaggacgatccttcgatccacctggattttgatttggatttgtaattggaggcaggattacctggtggacccgatagaaatcgggtgtacggactctccaccactacggtcgagaacctgcggatgacccataatgttttaaccgttgggatagaaatcgggagcttgcaattgctattgagcactcagtctccagagttcgcggtcttgttagatcaatgagtgcaagaaccatagttttgaaacccaacccggtggtcgacccggtttaatgatcgggtcacgggtcagatgggttgacccgggtcaacaaaaaaaatcaaataaaaactttaataaatacaattcccctctcttatccctctctcttcaatcgactttccaactttcaaaccactttccagctttcaattcatttccagctttccaatcacaaataaacattcttttttaatcaacaacaaataggcattctctttaaattgagaatagaaggtaaagaggaaaagaaaatcttaaagaaagagagagagagagagaaaacacatgggcatcaaaacagaaaacatcagcaatcatgcatcaacgacaacgctgatattcacgcacaaaactttgaagaggggcttttccaatcatgtcttgatgcaggatctgataaaaaccggggatgttgtctttaatggaatctacaggaatgagcagggatcactacgaagaggatgccgtgtttggggtagaggtgtattacgggcagtcaggcacaggagctatgcgattgaaattgctttttcttgttatctctgtctgcaattttgcatccttcatccttcatctgcatcgttttgactttaaaaggccaaaacgaacgacgtcgtttcctggctatgtatatatatatatatataaaaagagaccgggtcttagccgggtttgtctgggtcgaccgggtttcgccgggtcaactcctcgatgggtttttacttagacccggaccggtcctaggcctgggtcggccgcgtcgacccgccgggccggtccaggtttcgaaactatggcaagaacatacaacccatctcaatgaaaaatataaacgactctctacggattataaagaacttgtgcacccttttattagccctatggtcctggggatgaccaacctcctctttcccctccagcgtcgtctttgttttagttttattatatttgaacaaataaatttgtaataaatatttgaataatttatttttacatacttgaattttatataaatttattgaaagtgtctttttttagtatttttttttttattcttgttgcttcatatatatatatatatatatatattttatatatatatatagccataggatcttcagttgtaattaagttgattttattggttcttaaactttgaaaaggtaatacaacctcttttaatgtgaagttgttagaacaaatgcttgaatctttgacaataatgtttatattgcttcgtctaaatttattcaataaataaatatatcatatttactaatagttacagagagactaccattttcctagttttttctccgatgcagtaacttaaaggaaggccgattcttgttacaatctgaaagtttatttaaaactattcactttgtgaatcaaacggcacggtaagagtatttttgttttcttctaaaattaaagatgggactaaatactatactcacaagcctagctaatataaggtgtcaaaattagaacatttgtaagggcacgcatagttggaaggcctgtcttgtggagcatacgaattgaccggagcagagtccctataaaaacctcatagggtgcgtgaagatagtatgcctaccagcttactcattgcttccccaatataccagctactaataccaaaggctgcc

SEQ ID NO: 63 - DNA, 3000 bp, Poplar sp.
agtttggtccttggttctggatttcttcaatcaagtccctaattggccatcaaacttcaatattcatgcaattaagcccctgatttgaccaaatcaactcttaaaatagtaatttgacccctgaattttaatttcttctaattaaagcccatattgacttaaaaaaattttttttcttgcaatcaaacccttcataaattcaattaaaccttcaataaatttaattgagtccctaaacatctgatttggacttttcttcatcaaattgaattttctttgtcaacagggctctcatcaattaaaaatatactgtcaaattttaatctttgtatttttgaacctcctcaaccaatttctagtcatttcctaagcgctccagcatccttttcttactgctattattttttggattttttgtttttattccaaatattttttttgatttttttaagagaaaaagtgaatttgggaataactcaaaaataggttataacaccttttatgatcctcttgctaggacaattgtagatgttgtatttatccttagaaaactgacattatgattctcatcacaaaactggcttatgcttagtaggttactttaaggtcattcacaaataaaacattaggaaaaataggtaaacaatgaatttcaacttttattttaccttcaatggtagttatgcttctatctccaaaggtcactgaatcaccattcgtgaattcaaatttcttaaattgacctttatctcctgacatatgtctagaacaaccactatgcagtgtgtactactaaacatattttctttttcttaactacctattgattttttattttgttttgttagaactttcagtctcattagatttctcacaacctactgacttatcaattttcctttctatagtatataattaatttaagattaagtcaactttgtattctaaattttacttgcgaaacagtttctttttacatgtccttcaattctggaacactaattaataagtagggataaacttacctttcaacttacatttttggaagttttttgatttgtcttttagtatgaaaggttccttaccctttacaaaggtaatccctttcgaggaaaaagatacaaatttactgttgatggagatttcatgtgtcatgtatcttattcctgtacgatcaatacttactaattgagctttcaacaattcatcaagtttttgtattgctaacggttcttatgactatttgcacatagttagcttgttttcaaatgctttgactttcctaaaagatctagatatctttacttctaacaactttagggcttctgccaattttttcttctcattcttcatatctgtcagtttattgaataatttcttgaccttcaccaattcttcccacaagtcatcataagcttcctaaaagcttagttcatgattggcaataacaagagtaatatctaaatcactataattactgacaatctgatctatgtaagaatcacacgatatctcaatagtttgtttcatgtcaataaatccgttaaaagtgtcagagagagcaacaaaaacaaattcattatcagatgatgaattaaaattttcagagttagattcatcacttaaggtgacattaagagcttttcctttatttcttttgaaattaggacaatcatttctcaagtgaccatatcctaaacattcaaaacacttaactatttccctagattcagtcttaattttactttcattttccgattcatttcttttgataaaatcatttaccttttcacctttattaattttcttcttcttaaacataaattttctgaatttcttagctatgagagttatatcttcattattaagattatcattagaagaataggcatgtttttccctagaagatttaaatgcaatggacttactttttctttgattaggcaatgcagattcaattgtttgtaaggaacctactagtatcaagatccttgttttcttctagggatgttacctttggctaaaatctttcaggtaaagatcttaagattttccttacaattcatgcatcctctactttgtcttctaaattgaacttggaattcacaatttcattaagtttagtataaaactcatcaaaaattcatcttccaacattttaattttggacaaaattgtaagacaaactcgtgttctgaaaaagccagtctcaactttagtttctacctagctagtatcatgttgatctatcaaagtaaaaaaccacctttcaagaaggcaaatgcatgatagcaacagattgattttggcagaataatcttgcacggaatagtaatgttatttcacatacaacctaacctggtcattgactatgcggactctgtatattttattcctcgttcaaaaacaaaacgttggcttcttgaatctaaactcaagaacccatcaaaatccatgtcctaatacagaccaccacgtttactaatagctacagagagactacgattttcctagtttttactccgatgcagtaacttaaaggtaggccgactcttgttacaatctgaaaatttcttaaaactatatattcactttgtgaatcaaacggcacggtaagagtatttttgtctgcttctaaaattatagggcatctgatgccaaaagatgggactaaaatcactgcacgaaaaccatttattagcttactaaatacaatactcatcagccattagaaaatatactcatgaagggaaagtttgaactgtctgaattaatgctggctaaaaaacacaacactatgtcaattaaattagttaatcataggggtcaaaattagaacattttgaagggcacgcatagttggaaggcctgtcttgtggagcatacgaattgacaggagcagagtccctataaaaacctcaaaggttgcgtgaagatagtgtgcctaccagcttgctcattgcttccctaatataccagctactaataccataggctgcc

SEQ ID NO: 64 - DNA, 3061 bp, Poplar sp.
tttttataatgtagataaagtcttaaaataaacacattattaaggtaagcatttttcattcctaaagtctatagtttttttttttaatttgttcaatatattttattgtttgtattgccatcataattgaatactttttgaatttcaattgttattgttgattttatttttttatatttctttgttttagctattgttatttttgttgtgttttttgttttggtgtatttttataatgtagataaagtcttgaaataaacacattattaaggtaagcatttttcattactaaagtttataggttttttttttattttttcaatatattttattgtttgtattgccataataattgaatactttttttaattttaattgttattgttgaatttaccttgtaattagtaattgaatatataggaataaatttaattattttatctcaattttactctattattgcatgatatgtgcttaattattttcattaattttaattgttatttgtatagatgttaggttatatacaagatttttgaatggggtcaagtggttgtggctattgttaatatttgcaggtttgaaaactttggatagtctccagtataggggaggtgctgtcgaaattttttttaacaatcgtatttaattgtataattatttgtataaaagtgtgtagatgcttagaacgaaatcaacagctcgtcgctcacatatggtcgcagctagttcttctagcaacgaggatgacatgtccttaggtgtcaatcaagaagaggtacctgcgccgcctactgatgttgcctcttctagcatggtttcatagcgcaaaggtggtgtgccttcacagcggaatcaattcacccgcaagtacgaggcacagtggaaggatgacctttcaatataagtttgtttcggttatagtttttttttttaattataacataatttatgaaaaactaatcaatatttcattaatttaatttattttcaggttcacaaacattgaggccgcccgagtactatcatcggcgtttaaatcattgatggagatttcattatttcaatggagtcgggtatccagatatcatgaatggataccaaatatcgacgcatggtttgacaaatttgaggttggtgttaatttctaatttccagcttatttttaataaattattaatataattgtaaataaattattatttttattttaaataaattatttatacacaacacaaattcgagtgggataacgcgcttgacaatgttgtgaggagggtgtgggaaaatcacgcgacaacttggtaacatcgaaaacaatacgatattgttttttaaaaaattatgttttaaaatctaatttgtcactatggaagtaggttgcgtgatttttggtatgaagcacaaaaaaaggcaaaaaaaaacgcgagaaataacgatctccaaggctaaaacgacgtggcggtttggagggatttcaaactgctagacatcctgggagatatatggccacaatatattgagcacgtgatgtttgagcggttcacacgatgctcacagttcggtgctggcaaccagaaccggcaaattcatggtttggtgacaatgcacaccgacggcttcgttccgtttgctgcacatgcgaaacggatggtaagattaatttaaatgaaatatatcatttaatttgttgttacttaattaattttttttcttacaggctacgtcttttggatgtgagtcgagcccaatggagctgtttgtgagagacgcacgtgcgaagtcaaaactgccaaaagtgggtgcaacagtttgttgacaaccgcgctcaacactttgtggtatgttcgttcaaccattttatttcgtaagttattatttttattgaattaaatatgatgatttcttttttcattttcaggagacctataatagtcagttgagggagagatatggggatatgatccttcgacccatccggatttcgatccggatttgtggatggaggtaggatcgtctggtggacccgataaaattcggttgtacgggctctccaacactacggccgagaacttgcgggcggctcttagtgtctcagccgttgggagctcccaatcagtatcgagcaatttatcaaaggagttcgtggctttgcagcaacacacagctcatctcaccgaaaaatacaagcaactattggcgaattatgaacataacatagctcacacagctcatctcaccgagaaatatgagcaactctcagcgaattatgaacaactttgctaaatggtcatgatcataacatcacagagtggtgatacatgtgcgacccctttttggttgtatggtcccgggaacaaccagcctcctcctccagctccgtcattgtgctaatttaatatttttttggaaacacattcaattttttttatttaacatttaattttttttatttccaatggcatcagactaccatttttttagttttttctccgatgcagtattaggccgactcttgttacaatctgaaagtttatttaacgtatgcaaactattcactttgtgaatctaacggcacggcaagagtatttctgtctgcttctaaaattatagggcatctgatgccataagatgggactaaaatcactgcacgaaaaccatttattagcttactaaatacaatactcatcagccattagaaaatatactcatgaagggaaagtttgaactgtctgaattcatgctggctaaaaaacacaacactatgtcaattaaattagttaatcataggggtcaaaattagaacactttgaagggcacgcatagttggaaggcctgtcttgtggagcatacgaattgacaggagcagagtccctataaaaacctcaaagggtgcgtgaagatagtatgcctaccagcatactcattgcttccctaatatacctgctactaataccaaaggctgccatgagattcactaaacaattccaatttggttgtttggccttgctcttcattttgggagcttggccttctaaatccacagctcgaaccctcctgg

SEQ ID NO: 65 - DNA, 3000 bp, Poplar sp.
tgacgaaacccaaactcctaaagaaatttagattcaacaatccaaaataatatatatagattcaagaagtaataaaaaataaaaaatacgaatatgaaactatgaatagcaaaatgaatttgttctaaatataaatgacacggagatacaatttttttttttatgagaataagaaaactaatgaaataaaactgttatggtctcctcaatatgatgtggcatgcattcatagacatcaaatcacaccaaacactattaaatttattttgtcccatggaaaaagctagaaacaaggtagtgtttatcaataattaccttattgtctttattcaacgacatcaacttgtaaggcgaagtataactttcagttgataaatgaagtttcctcattgcctctgtagacatcacattctaacaactatcactatatattatttggctataaaatttatttattttatggtgtatatataatgaaaaatattagtacatcatcaatcttcttctgactcacccttgggtatcaacaactcttcttgataacaaaggtagtacctctatctcccagtaaaatctccccatcattatttgatccatcgttgtaggcatgattagttttgtccataggcttctctatcaacaaattccttcctagatgactacatgttttgttgtactcggtagctcgatgccctagttcatcatatctaaagtaatgaattctaaaaccatcattaattgtcaattcaacttcgatctaacacccttacctcttaattcattcttaaaattcttaagtttggacttaattgtcaatctaaatttttccctaggttgctaatctttaattgatgatttccccttctataatggttagctagtttgtggtgacaaaaatgacttatactcattaaacaattcatataatgaatctctaattttgagtaacattttcataataccatcatcaccataaaaaaaaaaaactctagatactataatgtacgcctaagatcaagaacaaccacaactacaacataaacaagtatgttcattttattagtgcctcccttattcttatcaaatctttctttcatattatcgccatcaaacacacacacaaatgtcttcatgttgcctcaacttgcaaaacactaatcatcgcattaacttcattaaaaaaaggtaaataagaaattagagatttaatttgaacacaatttaatggatcacaagttgatacataaggttaataaactgatttgatgagtcagtattatgtatttataaataaaaaaaatgtatctatagcaaactaacaatattggtgtttatgaagaaaagagagatcatgtattcgaattccatcaattacacgaattcaaacttagtattgatcagaccattcaggtttgattgaatcggattaaatctttgtttaagttaactttaaacctaatctaagttaaattatgtgttactaaatttctagattaatttgttgaattgtgtcgaatataaaaaccatgctctcaagacatctcataatcgagtttgaagactatgattgggttaacctaaattataagcttgacatctccagttccacctgattaatttaagaagcccatggacctttaatgcatgaaaattatattttgcttattgaatccaaactaaataccgaactgacaaaaaaaaaagttatttctgttgtctccgttctagcaacaaagagatgggtgcgattatatatatatatggagtacgctgccatttctttcagtaatttcttggttgcaatgcgaaagcactatgaaattgttaagaaaatgtagaggaaggtgcattctcctttcttgattcaagattatagaagttattattcttattatacagtaacctaaaataaacaattcatttggtgaatcaatcggcacggtgagagcatttgaagccaaaatattggacaaaactcatgcattagtttagcacatacaccactttatatatagtaaagcacattcaaaagcaaactatgatatgacaacctaaaataaactctgccttggagtgtgtttatatattcaagtcttcaaatatctttacggagaaggaggacatgttattaattagcgaagaaattaggatgtcaccattgggtagccatgatggatgttaattgttgtgtcatggcattattcttatgccatgtattgataaaaatattggtaatgagtagtataattgacgtaaaaaatagtgtattgatagaaatattggtgatgagtagaaaaaataatttgaaattttatatgtttggcttctaagaacccacaaaaaatacaaaaaaaagaatgtgtcaagacaacattacacgatcatgagtagaaaattcctgccatttgggcagctgaaaaatttttattaaaaaaaagcttagcaacatcacatgtcttaaatctagactcgatgcctaaaaatcagtgtatgtttcttgtttcaaagtgtttatcttgaaccttagtcacagtgaactagtagtacaataacatgtctcgaagtcctacctctcagagacaattgcactaaaatgtttgctgattgctttagttgatctgatgcaaaccattcccatgatttgaagaaacggcacggtaaaagtgtctttgtttgcttctgcttgtagatcatttcatgccaaagaataggacgaaaatcccctgctaaaccattttctggtttacttcatgctccattcataagccatacaaaaaagaagtcggaattaaagggaaacatttcgaacatcatcgggggtaagaatcacaacattttcaagggcacgcagacttgaaaggcaagcctcgaaatattataagcacaacggtatgagcagatgcactatataaacctcaaaagatgcaaagagatatgtgtgcttgcctgctttctaattccttcactactatagtagctgctaccactgccaagtctatc

SEQ ID NO: 66 - DNA, 3000 bp, Poplar sp.
atctacaagccaaaacatatgagtcagccattttgaagtgctgcataaaagaaatccaacttctactagctatcaatttagtggaacataaaagttcaagctgagaatataaataagatacatgtgcaattgcaaatacatcatcaaacataataagaagtgtaaagctcaagctaacaaacataaaaaaacccaacaactttggtttggattcacctttgagatgaatgttttgctcgtattcatcatagaaaaaataaagctataggttgatggtcctttcaaatttcctaagatagtgggagaaaatacatataaattgaggtattaaaaatttatgatattttaaaaactttcaacataatagatttctctctctttctataatggtaacatagttgaataaaactaggagacaagttattgcacagcagaagtgtatgacatcaaattaagacttgcatattaaaaaagtttatgaatcattgagttaatatatgatgcatttatcttatttattttcaagtctagataaagagtcttttagtctatgtgatgagtgaggttcatgtatatgaattgagttgatatatgattcatttatctcatttatttcaaattgatatcaaaagtcttttagtctatgtaatgaatgaggttcatgtatgttattaaacctattcatggtgggttgtttatgcttagttaataaatacttcattcctcctcgttaaagtaagacatcttataataaaaataaatagtttattctaataaaaagtgattcttccataattatcttatttcatctctttggtgggttcctttaagtgatgagttgattattttttagagcttacttgtgttttctcttttaaatcttcattagttccaagtcgattatcatcgggatatagtttaactaattattttgatttatataattgtaatgtgtggttcaataaaaaattgttttggcacattgtttgcataataacattatagatgttgtatactaacattggttatgaaaaatatattagaaaaggacacgttccttgtctatcaagctttaaagatcttatacatcacaataaataattgaataaataaaataaatttaatacataaacatatcctcaagcattgtaaagaaaagttgagaagatatcacatcacaagaaatttcaattgagattaataatcaacataaagcctgtagatttttatcccctcatagtagattttgagctagaacaattaatgtttaataacgattcaaaatctttaactactgatttagcatgagcatatatacatggttgacttgaaaatgcatttgatataggacaaagtgaaaattaaaagaaataaatttggagaaagaataagcttagaattaaaggaaatgagcttaagaaaagaaataaaagagttaaggtaaagaggaaaatggggggatagaaatgtttcctcctcagtaaatttttattaaaattctaattaaaataaataattggatttacagtaaactaaataaaatattcaataataattaaatcaaacttaacaaataaatccaaataaaattcaatataacccattaaataaaatatttaaaaataacaaaattaagctcaataaataatcccaaatataattcaataacataaaggtttgattatcttccatcatcatagattatatggatatatgaacatgtctcgaatttgatgttactatcaacacctatttatcttgaaccgattttcttctacaaactcccgtgtgaaccacgtccattgtgaaaggatatgcaagctgcacaattcgttaagagagttgtagattcgaaaggatcccacttgcagacaatgagtaaatgataaatctctctcttctgtttttttttttcctaataagcacgacgatgccattaattgacacttagcttaatgagctagcaagaaatagggacacggattattctcttgaatccatcttcattctgtctatagctccactactggagtaaagggaaaccatcttacctctcttgctttctagtttttatttaattaatcatttccaaaatcaacaaaaagatttctttgcacgtttggtatatgtaacaaccaaaaactcaggtcaaggaacaattgaagaaaattatgttttgaagaataagctcaggtcaagggattccaatgtgtagcttatgtttaaattttatgattgtgcatctgcattagtaatgatgaaaagtttcaatcagaaaaaacctgcattttcttttccacaaagtcttgtcgatccctgcatgtcgtgcgaaccaaactggtttcaggataaagtcctacgcgtacctcttcaaggaacttgtttcggctggcataggaaaatggaactagcaaaaaaaggtagattgctaaaatgtttaaattcaatatgtcaaggggtactctttctgaaagagatgacacattaagtacggcatataggctcaggctcactgattattattgttattttgcttgaattcatgcttaacactccaatattgaacgtaacttgaacaattagttggataactcacaagtaaaaggaaaaataagcattgcagaacaatacaagtgctacaaaataaaatatgagaagtgcagacaacgcagcagcgtccaaattttgtgtcaggatcatacacaacgtgccagattcaccaggttatttgcttccacattgtcagaattgaagccatggtgtgaatgctgtctgagagagatctttaagcagaccaatgcaagtactataaatacatgtaattcacgaatgactagtgcaatatcatcacatcctacaatacttgcctatagtcacaatcttgcacacttcagcagaatggcttttataccagaaaacaaactaatctttgcagtggtcttacttcttgggctctggacttctcatgtctggtcacgctctctgtatgaggcttccatg

SEQ ID NO: 67 - DNA, 3000 bp, Poplar sp.
ggcaaaaacaagccttacaaggtaacctctccactccatttacttaatcaatcatttacattcttgctctctctctccccgtaaattatttctctcaacattcatgtttagaagaagattcgggatgtttttagttcaagaaagaggtcagtgaggaaggaatatgagcagcttgctgtacagttcagaagtgatccaaaatccaatcaagaagagagtaaaacaagtttaatggcaactccgtctataaaggaagcaaaaagatcctcatctcatgatccctctgaatctgaatgggagcttgtctagataccagcagtgtttagtattagtaacacgtccgtacgtgtatataaatgttgaatggggtgattaggatgttgtgccagatgttaatatttctcccaacctttattccccttctttgcatactttcttctcttcccgagtgctgaagtcggtaaacggcagagaaaaaaaaaccaccctgatctataatgcagaaatttgtgaagttatattcagttattttatgatgtcctcacatcatggggacacaagtatttaccttgtatgacctgtgagtattgtgcatgccttgagttccaagccaaaccacttgaaggaattgattatttccttcctccatgaagtttcagttgttttaagagctgcaagatttgctacatttgaatttcttgaaatttgttgttagtaattctaaaaccaaggcacactgcaactctgaaggatacgtagatgattgtaggcagctgatgaagatagggcagacaataacaagttaactgatctgataatagtaaaccaaggcacatcacaactcttgctgaaggtcaaacaaccaaatgtgaggaaattgtagtgtccaagaccaaggatacatgcaagagcttgttccatgtatcacgatgagcctttgatttttctgttgcagatcagttttcaaaagcttgtgctgctttcttgcatacaaagctggatgtgcatcgcttctatactcttgatagcttggtattgttcaggtatctcactggtatcatcatgcttccaattgttttctcaataatttcttttgctgggtcaggaaatgcacacataggattcaaccatgatgggttgtgttttattgcaacactggtgttgtggtgatatgccacagaaaacgatggttgttttggtcgcatcaaggtggcgaatgatccaacaaggccatgtcctatgcctttattgaatgcagattcattcatttcctctgctaattttcctttgtattggaacaaatcccacctgcaaaagttgacatccacttcgacattatttgtctttcaaattccacaagttgactaaccttgtcattatagttttacacgaaacttatggcttgagctccccactgtaaacccaccaagtcatggccatggtgaaaaccatggcatcgtctccccgccacatttgggccaagggcgacagtttgtcaagaagccttagaactctgctcccgtttcttgcttgtgtttccctaaaatgggctcaacaaaactccggtaacaggagtaaaatcctatgtttcaagtttttcttaagttgattcatggttataattcaactaatagaatcactagaggattagaaacagagtaaaatattgtaatcttacctttgctttgaagaccttatagacacagcctccgtaaatatgagctcaagaagaaggtatggcagaatgaagaaggcaagctagaggttcccattggtttctgttgagggaatttccaactattatcaccatctttcatcttaagtctctccaacatgtccatgccattaaacattgaatacaaatctttgttaaaaagaacactaaacatgcacttgtttatatatatatataagctgaaggactgaaaacacttgtttttaataagccagaaaattggcttaaaacacctatcatcaaggagaaaaactaaaagagtgaaaaaaagaacagaaggcctaaaacaaaaggaaagcataccaatgcttgtagataacaatttaagcatcagattgcagcaaacaattaaccaaagtataaacacatctaaatgataaattaaatctttttagtatagtgtttaacattctcaggaaaagaaaacattaataagttcggttgaagagataaattacaaccgatactccaaacttttaatgctctaaacccacaacacttttaatactcctaggatagcatttgattattgcttcgaaataaaaacaaaggggacaaatgaggcatgcatctcttatatttcatgttttaaaattatataaacgtattttaaaactatcttatagatggatttattttcaaagtaaaagaaattattttttttaatgctaccctatgaaagaaattacaacacttttaaggcgagtcatttgtcctctatgatggccaagaaaaggaagaaattagtattttgattgcatttattatctactacgaggattgaagatcagtgtaatattgatgacttccagacatgcttcacaactatttttagacacttcaattgaagttagtataagctgcctatgaatttgaacacagttaacaatattagaggcagcatgatcctgccaagactaaagactacaattactgtcaattcaaatattaaataatcaaaaatcatttcctttaggttatattttttgttttgtacaataaaaacacatttagatagttgaaaaaatatttagccatatatcagagcagactgcacggtacactactaccaggccatctaaatcaaatgcaatttgccggttgatctaagcatgggaggtgtcttcatcttcctaaacaagtgcatatagattcataaagcaatcaaacaggaacattagcatactatatatagaggttttctgcatatgtgcagctcattcatttatagttcaagcagattaactacatcatctagataaacc

SEQ ID NO: 68 - DNA, 3000 bp, Poplar sp.
tattccaaacaaaagaattcatttagcaaatcaaatcaattcaatctacttaaagagatgaaattaattctagtatagaattggttccaaagagctgttaatgtttggtcttagtgtccatgtgatttttttcccctcataatttacaaagttgctcacagatatagatctctatgacattgaaaaatggagattaggataaggtttgatgaaaaacatattttacctccataataactttcagaattcttaatcctagttcgagatgctgctgagttaaactaggatgataaaaatgaaaagtatccaagtactaccatctccatagctggttgggtggtaagaacacctgccctgctcatttttcgaactagtctgggttaagtaaatggatcctttgcctctattaagttctattttcaagcaaaccttctgcaaactgatgtcatatcaaatcttttaacacatcaaatggaaaatcttttggtctacttccacccttcctaactcctacttcaatctgatctatacactttctccccaatgcacccttggacttattttgaacatgaacaaaactataacattcgacctcccataagttgagtttaacatgcatcgaatttgcttctagatttcttagatacaaaaactcatcactcagtgattaaaacatatgtgatttataggccgaaactcatacctgatacccctactacttcctccccagtcacagtagctcacaaccagctttttcagctgccatatacctttccaagccatctgacattagaaaacaatgagctaacaacaaaacttacacaataaaaacgcaaaattttctcattaacaaatgaaaaatctctttatcttaaagcatacaaagttacaaaaaacaaaaccaaacaagcaagtgacgtgattatttcccatcgaaacaaacacaaattcctaagccactccaatccaaaatcagcttaaaatcaaaaaatccacatgaacaatgacatttcctcacttctacaaacactccagagttatcatctctgaatactaatctgctcttcaaatgaaagaaatagaaaagggtctcttcaaattattaaagccgccttacaccttcattaatttgcacaacaaaatcacataacaagcaaaagaagaaaaagggtctgttaaaaacacaatctttcaatcaataaacagacagaaagtcactaaaaacccaacattaccattcaattaataaaacccattaaataaacagaaaaagatcagatcttttgctctttttgcagaaaaaaaatccaaaaagaagccaacttcagaaaacccataaatccaaagagagctacaagggtgaaaaagacaggtactcaaaatgaagctttgagagaaactgaccttaagctttgttgatggggctgcaagggttttgcggagaagagggacagggcgctgcttagtgaaggatttgtggggttttggtggcaggctgattacaaaaactttatttttacccccataggcttttaatgtttctcttctatccttatggtctacaattttctaatgctactcctattgtttctaagacgtttcaatttcacccctaaacatcaaatagctaatgaaatctatcgatgaacctacatttgatttttttcaactttcttgtgattttagattgattcgaaaacgaaccccaagtcatgagctcattaagttaacttgtacgtcactaaatttttaagttaatttttaggtcaccgagttaatttatattaatttttttattatataaaatttttagattaattcttcgataattcttacggtaatcttgacaagtgtagagtgaaaatcaattcatccaataatataagagaagacagtggagacatggacgtgaactccaaattaaagatgagattttctgctggtagcccattctggatttccaggtttcactgcatctcagcatggctaactaaaaacgatggcaagtctttgccagataaagttgttcaaagaattgtgaaaaaactccaggattgcaaagtcggctgtggtggacttcaaaggatatatttcgaaacatttctccattgtctgttcaggctaggatggagtacctgcaattagcctccttggagggcaagaaacctttgaattgagtaaaattctagtgggatgtgtctgatcataatgcaaaggttacatgaaatgcccttggaattgctaggaatgtacgtaccctatgataaatgcctcaaaattctgcgaatttcaatgtatttccatcgcaaggtatccgagatgctaaacacatcaactttcagacaaggtttatgttgaagggccgagcttcttttacgttgctcgagtaactgtaatgcagtagtatctttcatttgaagaatgaaaggaactgcaacattttcagggcaagtcatttgtcttctatgatggccaagaacaggaagaaggaggactttggctgcatttattatctagcttgaggagtgaagatcagtgtaaatatcaatgacatccagccatgattctcagctatttttagatacttcaactgaagttagcataagctgcctgcgaatttgaacacggttaacaagcctagagacagcaggatcctgccaagaatgaagcctccaattactgtcaagtcaattattaaatactcaaaaaacatttcctttaggttcttttttgttttgtaccataaaaacacatttagatagttgagaagatatttagccatgaatcagagcagattgcacgggacactactacctggccatccaaatcaaatgcaattttccggttactctaagcatcctgatcttcctaaacaagtgcttatagattaataaagcaatcaaataggaacattagcatactatatatagaggtttgctgcatatgtgcagctcattcatttatagttaatacagtttaactacattttataaataaacc

SEQ ID NO: 69 - DNA, 3000 bp, Poplar sp.
tgtagccactagttgcaacaattttctaccttgctcttcttgttcttggcagcaaccagttgcattttcgcttgaaaaattgcaggaacaagacaaaaactccgagcaactttttgtttggaagcaatctgaacatcaagatatgaacttcttttcttttgaaatcttacaagccctacataaacctccatcaaaactacaaaagaattaaaaccccaaaatccatcagatcttgtcagacaaaagaacccatagaagaaattgctctgttttttttttttttttcctgataccaaggttttcatgacatatctcataactctgaattcctgttgatctccaaaacgtcaggcaactcattatacatcttttgacattccacatcaatctcaaatgttccattattataaaccccattgttcccagcttccggaattgtatgacccattatcatccccttcatcccagccccataaccactgcattcctccctcaacagtatcctggtgccaattttcctcacaactgcgttgtcagattctgcaatgcagctatcctggctctaataccacaaaagaacgggtttaataccaagaaagtcaaaatgaatccatcaaatacatcctcttgctttcctagtccaacaccctcactcttcatttcattacttaatctgctgaacaataccaataagctaaattctctaccttctctaaccctgtattaatcacattcctcaagtggaaatgtattctacgaaaaaaatattaaagggcaccaccacacgaacattataaagataactttgatgaggatgtccaacatagaagatcagtacagcatgggatagcagagtaggaaaaacaaatagtgatcccaagcttaatagaatcagtataaagggattcaattaataattattcaatataaaaggtagttgttaaacaagaaaattaaaaataaaaactagtttctggataattaaaaacagtatagatcaaatattttccatcagaacgtccacactagcagcgctccttgaccacctgcaataagttcctctttttcgcatgttccaatgcagcattacgcatcccaaatctaaacctccatttcagctactgcagtgacagtggatgtgtttttgtccacggtatttgacatcgaacgcttagttatcggcaggcaccatcttgtgcatatttccaatagtagcgtgaccagtagcaaagttagtattataccactgtaggtaagcctccaaaatcttgcggcgtgcaatacgtcaaatcctttgtatatattgaatatgcttaggataagtgttgagcaacccgccaggaagtggaaccagttgaagaagggacgatacttgctatctttgtcaggtctgaccagaccaccaaacacctgcgctgttgcaagacagaagaggacaatgccgatgattttgtgacaactatgttcaattccatgagaccttatgccaagaaatattccagtcccaaatctagacagaccaccaagaatataggccagaagttgacaactgacatgcaagtagaaccataaagggcctgcagattcgaaccttttcaagtatcttgcaatgacggccccaacaggcattagaataccccagcttactgtgttcaatattccatggacatttttcagtgttgttgaagaacttcttgtcgctttaatcctccctgaaaggaagtccaaactccccatggatttgacgttgggactggatggagcaacactatgcatcattggagtgttttcagacattgggcctacttgccagagatgattgactgtgctgatgtttccatggagctctaagcttgcatagattatcatctcattgttctgattagtagcggacaagtccaagacaggaaagctaagatttccttgttccaatcgcgttccataacttgttataggcgaagtatagaccgcaagacttccatccgttctctgaaaagaaacgattgcttgggaaccaatcatccctcctgaagttggattgatagcccaagcaatccatctgcgatcggtcacgccagtatgcctgaaggcaacctcaactctgctggataatggatggtagttccagtgaagagaggaactcaaaacaggcaagtcgctgcaagaagagaactgtttgttgtttgaaaatttataggtcgtgcatggttgttgttgtgctatgcatgacaatgtgcagaaagaaagaaagatggcgaccagaaaaatcacagaacgggccatgtttatgcaacaaaagggcttgaaagaagaaagatcggtgatgactagagactacggagcacggggaaggaattgtttttggatagagaattgtaaggctgattgagtgaatatatagggatcttgtcttccgtttgcgactcggaaaaatattttgattgcttcggtttcttgaaggaagtaatgtccgtcttatagtctgaaaagcaatagagagatatttcagtagtcggtctttccttttttttccaatcggattagcaatttattattttaaatagtttttttttttttactttgcctcaataaaggaaaatatttagccatatatcagagcagactgcacggtacactactaccaggccatctaaatcaaatgcaatttgccggttgatctaagcacgggaggtgtcttcatcttcctaaacaagtgcacatagattcataaagcaatcaaacacgaacattagcatactatatatagaggttttctgcgtatgtgcagctcattcatttctagttatagcagattaactacatcatctagataaaccatggtttcgatatgcaaaaggaatcaaacacgaacattagcatactatatatagaggttttctgcgtatgtgcagctcattcatttctagttctagcagattaactacatcatctagataaaccatggtttcgatatgcaaaaggctatgtttcttcgcattc

SEQ ID NO: 70 - DNA, 3000 bp, Poplar sp.
atacaaaaacaatttcaatttctcaacagggcaatgagtcagatgaggtgctcgtgaaggcatcatttcttgctgaattacagcgacgtgttctcaaagctgaagctgctcttagagagaaagaggaggagaatgacgtccttcaccaacggctccaacagtatgagaaccgttggtcagaatatgagttgaaaatgaagtccatggaagaagtgtggcagaaacagatgagatccctacaatccagtctctccattgcaaagaagagcctagccattgatgattctgagagaaattctgatgcatctgtcaatgcaagtgatgagagagagtttagctgggatacaggaagcaaccataggggtcaagaaagtaacagtgctagaccaatgagtgcaggcttgagtgttataagccgtatggctgaagaatttgagcagaggagtcaagtgtttggtgatgatgccaagttcttggtagaggtaaaatcaggtcaggttgaagcaagtttgaaccctgaccgagagctcagaaggttgaagcagatgtttgaagcttggaagaaggattatggatcgagactacgggaaacaaaggtgattttgaataagctcggaactgaagaaggtgcccttgacagggtgaaaaggaagtggtggggaaggaggaacagcacgagatatacttagattactttgtttggtggttagctcctggctatttaacatccgaaaattatatagcagagaaaaattgtgatgacttctttttgtacaagcgatgtggtgatggcagaacctcctggttcttatcgatgcctaaattaaaatgtacatcattcttttttattatcacacaagttgaagaagcaatattttcttcccatggcggtgtctatttcctggttattttttttgggggataattatagaaaccctcactttccttctatatttttattagttatattttttatcctgaaaatacattattgttgaacctactgcaaggtctctccctcacgttgcacccacacgcacttagagtgcagcgagcctccttcaatccctaacctgcatggatattaaacccggcctgggagttagacctggtttgatcgaatcttgggttttatgggtcaattcagaaaaattaaaaaaaattaaaattttaatattttatatgaaaagattaaaaaaaatccatgtagatatcgattatatatattattaataattatcgaatgctcaacctagatttcggggatgatgatgtgaattcataagctagaatttgatgatatttatattttatttattacctgttagctaagataattatctaaaaaagaaaaattcattctttcatatcgttttggattgatatccattatgtttgaaagaaactgctatccccactcttgttcgcaaagcttggtgcgccaaaattgacttttaaattttatggtatataaagctgtaatatatatatatatatatatacatatatatattcattcgataatatgtatactacattcattacctattaaataacataactatttaaaaaaccatattcattcatgtcaggttcatatcatttattcattatcttcggtttttcttcttcttcttaattttgcatgtgcctaagccttgaatgacataactcagtttggctgactttcatggttgggaatgtgagtgtatactgccaacctagtttttaacagctaagtgtacctctgaccaatgacttcttttttgccttggagtggatctcaaaggatggtatgaagagtcaggtaattcctatgttgatcatggatcaaagagtggctttgggtaggatctataagaaggaattcctactcttttctagtgatctgactaatcccaccatatattgaagtcttcaaatttctttacaaagaagagggtctgttattgatgaagaacttaatatgttactgttagctagtcatgatggatgttgattattgtgtcatgacatgattcttatgccatgcatgtattgatggaaatgttggtgatgagtagtatcattgacatagaaaatagtgtattgatggaaatacgggtaatgagtagtattattagcgtagaaaatagtgtctgttctacatagaaaaactcttatacatgtagaaaaaattatgtgcttgaaattttatgtgcgcggcttataagaatccacaaaaaaatacaaagaaaatgtgtgtcaatacaatattagaccatcttagttggtatcgaatgagtagaaaattcctgccatttgggcagctgaaaaattattattaaaaaaaagcttagcaacatcacatgtcttaaatctagactcaatgcctaaaaatcagtgtatgtttcttgttttaaagtgtttatcttgaaccttagtcacagtgaactagtagagtacaataacatgtctccaagtcctacctctcagagacaattgcactaaaatgtttgctgattgtcttagttgatctgatgtaaaccattcccatgatttgaagaaacggcacggtaaaagtgtctttgtttgcttctgcttgtagatcatttcatgccaaagaataggacgaaaatcccctgctaaaccattttctggtttacttcatgctccattcataagccatacaaaaaagaagtcggaattaaagggaaacatttcgaacatcatcgggggtaagaatcacaacattttcaagggcacgcagacttgaaaggcaagccttgaaatattataagcacaacggtatgagcagatgcactatataaacctcaaaagatgcaaagagatatgtgtgcttgcctgctttctaattccttcactactatagtagctgctaccactgccaagtctatcatgaagttcacaaaacaatcccaattcatttgtctggccttgctcttcgtgttgggagcttggccttccaaatctgtcgctcgtaccctccaggatgtgtcc

SEQ ID NO: 71 - DNA, 3000 bp, Poplar sp.
acaatatgagaaactgaaaaggttccaattaagtactatgatgcactctctctaaacacgagtaagggttaaggcaatttagagaaaagttaagacaatcacagaatgaatttagaatagcatatggcctatgaccacttcgttaccaccctctagcaaaaaattacagacaatagtatcacatttgcatctttaaattacggcattcaacatactgccaactaacacctagcagcaacacgtcaaattctaagcatgaatttgactaattgacatcaaaaggatcagattttacaatgtaagtgtcagataccactagcaaaaccagaaagcctatgactttggaagtttgatctcttcctttctcttcaacctcctttgttccttccaatcaccaactttctctgaagcactgcaatgagctgatttagaatccttccagtccttacatggagcagcacaatcacaaacatagcaataacactgcaatcaaatcaaatcagcataattaaaaactaacaaaaacgaaacacaatcctcattaataatttaccagttcacaatagctctcatgtggggttttatcaaatgggtatttagtacaaagatgccttgagtgtggataatctctacaagccacctatacagcaaaaaaagaaaaatccaataaagatcaaaactttataacctatcaacaacaaaaaaagcaaaaccctatatcctacttagccaaaaataaaataaagaataaaaaaagacctggcctttttcagcaacaacagagaggtcatcgacaccaccaccatcatcagtgaaggaggagacagagagagtggagatacgatgaagagaagtgtcaatatcagaagggtcgaaatcaaggataaagcaatcctcaatctcatcaaactttctaatgttttccgtgtttgttttcttcaaacaaaatatgggtctgatgggagtcccatctggagacggtgaagatgttatctcaattacggctgattaatctttaacctccatgattgtctatttgccttccaggacaataatcaatacactggtagtctggtacaacaccgagcaagttttaatccagagcacgcagactcaaatttcaaaaactagaatattgtacgaaaagagaccgttgcttttcaaagaaggcgcgtattgccatagaagtttttgttgggctgaggaagtatttgttgttgagatttaaggcctaatctattacaaagttaagtccaaaacaaaacaaaatcctggctcgcatggaacataattttcgacagaaaatgttttcgtgacattgcaatattgtagcccatcattttatggggcaaaatagccaagttctttcctaattctatagatggtgagcccctgcgctttgatggccgagaggcccgagacacataggatgaatctatgcactcgtacgtcgagaggacactatacgcagaaattatttcctccaatgtataaacttcatctgttcaacatgcaacccatgcactatacaattatttaaatctcacttttacgtaagaaaaaagaagaagaaagaatacaacttttgatgtattgatataactccatgagactacatatgccaccactcttctctctctttttaacgatgagagattggtcagatcgagggtgaagggctacccaaactctcgtgggggctaagttagaaatgtcatgggactttaggaatgaatatttgaaaaatcttcaaggattggggggaaagggctggtagtaactctcaagggattaatatgaaaataaggctaactttctagacaagaagtgaatttttaagaatcttggagggtcatgcacggagtcataattgagttatgtggattgtcgtgcaggggtacttatgggtgaataagtttgtatcgagtgtgtggtgaccatcatgctacccaaggtctatgatatccgcagaagcatgcaggcagcttggcgtgacataagctttgctaattaccttttaatcactacttcatcacaaaacctgttattagagcttgaaatgcgcacctaagaccataatttattgcatctcataattaaagcaaaacctaccaaatatgatgcgaagttgttcaagtccttctacaaagtcaacttcgtaccttgggacaacacaccctcgatagaaggtaataattaaaccattatctctctcgatcttagaatattagacatatatgcagggggttggcgtgcttccattaatcttgtaaaataagtgattagaacagagctacatgctggggtgttatacgatataaatgtagaataagtgacagaaatctccacttgtcatatgaattcttctaggttttggattaacaaaatatggaagcagcttgtttgtttaattacctcaagcggtacgtgcgtggagctagctagctagcatgatcttaattattgaatgtatgtggtaggtaggttttcgattgattgatagcaaccttgttcttaagaaaatattgtaatgagaatccttaggaattataatatactgccatgttgttctgacaaataacaacatggctggcgtttgatagagatgcaaagagcgacgaccttattttaaaacatttaattactttgatgatcaccatatcaaatagcctcccgacctaaccttttttatacttatacttggtcaagatgatgccacgatcgaagacgacgactactactataataagaataagaataggaataaggatgaggaggaggaggcactgtgccattttaggcagaggttgcttaagggcaatgacaagagagtaggcaccaactacaaggtggttgagtagtacttccccacttcaccatatatatatactgtacacccctgtcctagcgttcccataccctcccaaagcatttcttctcttctcttacaccttcttcaaccctctgttcccttaaaagaatcgatcaatcttgatcacg

SEQ ID NO: 72 - DNA, 3046 bp, Poplar sp.
tcatataaggtaggccacctgttgcattcttgcaggtttcgaataaaataattaccgagggatatattttttctgctagaaaccaaagactattgttagagttgattaggaaggtgatgatttgagagaatataaggaaattaattagatatgaaagtctccaatttgaagttgttaaccctatagtgaaattttcgaggagcttactcgtaataatcataattatatttgtacaagatacaaggcatattgtggtattgcacttaagagtagatataattttgtttgagagtgtggttgcgattgctttttaaaatgttttttgtattaaaatacaataaaataatatttttttatttttaaaaaattatttttgagatcagcgtatcaaaacgatacaaaatataaaaaaattaatttttaaccaaaaaaaaatataaattttaatgaaacgtgcattcccaaaccctttctagacaaccttacaaattgaatggataaaggtaaataatgataatcttcgcaacaaaaaatatatcaaaaaagcaatatcaaatatgaagtgttaagcattaataattcatatgacgttggtattttattcttcatatttttttgcatgggttcagaaattttacataaatatatctttactttgaaccgacaatttaacttaaaaagaattttctgtcaaagaaccatctcaacctaaaagtttaagctattgggttgagatggttctttgacatggtatcagaaccttgatgagcaagtgatttcaagttcgaatctcatcatccctatttatttgataaaaattaagtacaaggtaatgtggacccatgcaagttttaagtttaaatgacttttacttaaaggggtgtgttagagaataatataaatcatatcctggaacttcacataatagcttaaactattgggttgagattgttctttgacatcctttttattatatttttcaaagacatatatcctaatcgatttaatatatatctcccaccggtaaatatgaactgcccatacgaaattgaaatcctcaaagtctagggtcttgttgttatcttttgacttagtttattcttatcatataagatagttcttcaatttatttttaaaaaaattaattgaaaagtcatttgatacaaatctaatcatattctctctctttttcttacaaaaaaaaataaaatagcaggaaattgtgtaactaaagaccctatgaccctatccttgcgaaaagagaagggaaaaacttgtgtagttgtgggacctcgtttgtcacgtgttttgtcggtgcaaggagaggttcagacatgaggtaagcacttacgcaattggcttaggcaaagacttcgtcacccacttcttgaagtagccaattgcataacgccattgtaaacacaactctaattgcccaattttgtatgaattattcaggaaactgtagtagatctaatattttctaggaaagatacatctaatcattcttcaattttgtaaaataatataatacgaatagagttaataatattgtcgttgattgtttttatatttaaaattatatttgagttcgttttaaaaatatatttaatttaaaaaatattaaattaatatttttttttatgttttatgatagttttaatatgctattgtaaaaaaaacttatttttaaatgaaaatacatttaaaaaaaaatgtatattagatttttaaaattttttaaatatgcaaaaataataataaaaatttggattatgacaattatattcgaagtatttattcttttggggaggagaaattcaatttttaatacataattgagaacaagtttttttcaagtatgagagattgacgattgacgtaaaataattatttgaggaaattatgaaccaaattaacaagatcaaatctgaaacaaattctataaaaaaacctagaagcattgcatatgaaatatgaagctactattttttgtttcaattatttttctaattaatttaaaattttaattatttatatctacctaacttatgacttttaatttaattaatattttactatttaaaaattctaatactagatgaattttattaattagataagttttaattagaaatttattttataaaaaattttaggactaatataaatagaaatgtttagtatattttatggagattaaaattattatttaaatttaataaaaatatgaaagaatgtttttttaaagtttttctatagttagatctctgactttaaagtttaataattctagatttatctttgcaataaattgtgtcatgaaagtataaatgatggctcggcctggtacttggcagcatgcctcattgccccggtacttttcaagctacccacagttctgtatttttatagaacctttttgattatttacgtcattttttaattttaggacgtttgtttttttgttgtaaaaatattttttttattttaatttaatatttttttagtatttttaaattattttaatatgctatataaaaaataatattaaaaaaataaaataatattattttaatttaattttaactacagaaatattatttagttacattataaatatttgtttaaattggtggcctagtcttttcttagttgtacgtcggttataaaaactctcacaggtggccacagtaggaggtcccattccagctcattagtctgtttggctctaagttaaatctgcttttgattaaatttcaattttttttttttgctaaaattaagtgcggtttatactttttagattgttttgatatactgatgtcaaaaataatttttaaaaaataaaaaaacatcattgatatatatttcagcacgaaaagctatttgaaaagcaaccattaccacactgcgaaacactctctaaaaagattttccacccatttaattcaaaatttttccattataaataaagtgaatggtgggagtccaatatgcgtccagtttctatctaaaaatcaaccaacctcctccaagaacgaac

SEQ ID NO: 73 - DNA, 3000 bp, Poplar sp.
ttaaaattaatatcattttcaaattctttagctggagatgcttttacttggtttataaatttgccgccaaattcagtccagagttggaatgatatgtaaacaataatccaagctcgcatctctataacagaatcataatttgttttggctaatttggtgaaattgaagcaatatcctgaacaaattgttaaaagatatttagataggttcatgatgcgatcttggctatgacatcaaagaattcattaggagtgtctatatagtctattttaaggtttaaaacgaagtggatccaagagaagtttgatgggttaagtcaagaggtttaagttcatgatataatttttatttgggctagaaattatattagcaatactttcgttttttttatcacattgaaaaaaaatagatctaatatttttttaacattaaaattaattgtatcggactcgcagcttagctcatgctaattatgtaacaaaagtaaatgtcttcgtcatcatttgtagtgggttaattaaactactacgagggttattacattagtttacgaaatttggcatcatttcgtaaccgatcataccgatcacgtcaagagaagtctgacaggtggacaaagctttttctatgattgtactaaatattctaattattccatttgtcaagcttttttttctaaacagactgcggaagagttgcgtgttgtgtcatataacctattattcttttgactattttcatgatagctctattgattgaaaaattaaagttcaaattaaatgtttttaacttgattttatactaaaatatttaaaaaataatctagaaatgttaatatagtcatttacaactacaaatgacatcttcctttatttctttgttgtagtttacaagagtatgtttgtttttgtattatttttttataattttttttattttaaataaaatttttaataattttatattattttaatgtaatgatattagaaagaatttttttttaaatttttttaatataattttaaataaaaatcactttataaacaactaatatcacaattttaaaaaataacttattgatttatgcgtcaatcaattgatttaagatgaaatgattgattgtttgatttttttatgtggttttttatattttaaaatgggttttgattattttttttgtataatagctgttgtattttaaacaaataaaatataaatttggcaattaaaataaataaaattaaaaataaatcattcaaaaaaataaatgaaacgttaaacacaaaatctgcggttttgttttagtaatgacataattatatttttctctattaatagattgttgtagcaataaataccacatttataaaaaaacaatacagagaagagattattaattcgtattaataaaattaaagatgagggaatccttgagataactaatggaggggttacaatattgcaaacaaagttttagggaccacagtaagaaaatataaagtattggagtttagtttttattgaataatttttacattgtggatttaattttgcaaactgacatgctatgacccctttttgtctggtgaaacatgtttcttttaagggtgtgttagttttctggaaaatgacaggttactttttaaattttcccgtgtttgtttgttattataaaagttgatcaacgaaaaatactttccagtcaaagaaaaatttggcttggtttccagaaaagtgttttccttttattttgggcggaaaacaatttctcgaagttgtgaaaaatttagaaatgtcatattatttgctgattatatcaaatttggtcctcaaacttttgattgctatatatattttgttttgaatatttgtttttcaatttcatcccttagaatttaatttttatattaactttgatcctcatttttataattgttatttgcttttcccttattattttttaattgaaattttttatctatcaaatatggtcctcattcttttgattgttacttattttatttgaaataatttatgaaatggtaattattattattttaatttcttcatcttttaatttttttttattttttagatttgatctctattattttcattattatttattttatttgagataatttatgaaattatatatttttttcaatttcattctcattcaactttttaatttgtaagatttgttcctcattattttaataaacttgaaaaaaattaaacattaataagttattttccagttcattttccattacataaccaaacactggaaagtgtttccaacttatttttcattacactaccaaacattgaaaaataattcactttttcggaattcactttccaaatagaaactacttttcagcaaaaaaaaaaaaaaaagggctaaaatgcaactagattcttgatatcatttaaaagaaaatacaaaaaagagaaacaaaagcattacaagtgtgttttttttagaaaataaaaatcaaacatctaaacaacataatttcttctaaaacactaaaactattacatgtcgatcgcgtcagacaacctattactcttttgattattttcatgttagctctaatgagttcaagttaaatgtttttatatttaaatatctaaaaaaatattatataaatgttaaaaaactcatttacaactacaacacaatctctaatgaatgtattagttaaacattgttcttactctaatgactgtattagttaaacattgttcttacgacattttcttttatttttttgttatagtttacaagaatagtttgtttttgtgttatttttttttcagtaatctcgattaaatcagtttttcagtttttttttacacctctaataaaaagattacttcattgtcaactatttcatccaatcttccattataaatacttttgaagccgaatattcataaacccatccggtttcttctatctaaaattgatcgacatcctcaaaaaacatt

SEQ ID NO: 74 - DNA, 3000 bp, Poplar sp.
ttatttagaaatatattaaaataatattttttatttttaaaaaattatttttaatatcaatatattaaaaaaaatatgtaaaaaaattaaatatatttttttaaaaaaatttcatataacgcgtgagtggtacgttccattatggttgataaaaagtaagggtgatcattttcagttcgattcagtttttacctataaaaacaaccaaaccgaaaaaaaaaatttatataaaaaaaaactaaaaccgaactgaacctggttccaaccgaccggtttcggttcggttcggtttctatgtaaaaaaccgaaaaaacctatattgtttttaacataaaaaagccacaaaatcaatcccatcttcatcaccagaagcccccacgacagtgttgaatccataccggccttttctcaagcaaatagcctcctacagaaccacaaaaacacatcacgctctcttacaataatcaatcactcttcactatcacaaccccaaaaacctacatcaccgagaaccatactctcaaatacaaaccatcaccgccacaataaacactgtgcagtgcccactgccactttctttatccattttcctttcataaaaaaagaaaactcagcagctgccaacaacccaaaccataaaatccactaatcacctgcaaattaaagaaatctcactgctgctgaggtttatgggtgttattgggatgatagatctggagatgattgaagaatgaagattggaaggttaggtgtggcgtgtgggagcttgggttggggtggttaaactttgaagaacgaagaattaatgttgtgaagaattaattgtgctgtgtgctatggagaattaattgtgagacgtgagtggacttgtgagcatagttattaaacccggcccggggttgacccggtcaaggggccaggtctcgggtttcatgggtcaacccatgtcaactcgggtcaacctggatcaacccgaaaaattaaaaaaaattaaagttttaatattttatatgaaaaaattaagaaaaaatccatgtaaatatagactatataaattgtaaataatgaagtttaaaagaatattttaaaaagttttttatcccataataaaaagatattatgttaagctctaaaaagttttttatcccacattgaaaaaaaaatcttttttcttgggaacataaagtatatatactaataggtttcaaatcccacattgaaaaaagatagttttttttttgggaacatagagtatatatactaataggtttcaaatcacacattgaaaaaacatagttttttttcttgagaacatagagtatatatactaatgggtttcaaatctcatattaaaaagatattatgttatccttttaagtttaagtatttaaaccaaaaggttttttttttatctcacattgaaaaaacataacttttttcttgggaacatagagtatatatactaatgggtttcaaatcccacattttaaaaaaaaaaaacctgggtctcacccgggtcacgggttgacctgtcaggtcgaccgggtttggccgggtcgttgcaccgggcagtcttttgataaaactggaccggtccagcccccaggtcgatcgggtcccgagccaacccaccgggccgagtttaataactatgcttgtgagagcttgggtgggggtagttaaagaacgaataattaattgggtgtagagtctgtagacttttgagtgttgtgggaggctgtgccgctgtgaggattgaaatggtgtggctcgtgtgggttgtgtggtgtgtgtttgtgattatgaagattgaggagtatttatagattttttttttaatttaaaccggttcggttcggttcagtttgggttgctcgtttaagtattataaaaccaaaactgaatcgaaccagaagtttttctaaatattctaatcggttttttttatggttcagttttttcggttaattgtttttcacttttttcagtttaatcgatttttttgcttacccctaataaaaagattactccattgtcaactatttcttcatcttttaattttttaattttttagatttgatctctattattttgattattatttattttatttgagataatttatgaattttttttttcaatttcattctcattcaactttttaatttgtaagatttgttccttattattttaataaacttgaaaaaaattatacattaataagttatttttcagtttattttccatgacataaccaaacactggaaattgtttccaacttatttttcattacactaccaaacattaaaaaataattcactttctcgaaattcactttccaaatagaaactacttttcagcaaaaaaaaaaagaaaaaaaaagaagctaaaatgcaactagattcttgatatcatttaaaagaaaatacaaaaaagagaaaccaaagcattacaagtgcgtttttttagaaaaataaaaatcaaacatctaaacaacataatttcttctaaaacattaaaactattacgtgttgtgtcagacaacttattattcttttgattattttcatgttagctctaatgagttcaagttaaatgtttttatactaaaatatctaaaaattattatagaaatgttaaaaaactcatttacaactacgacacaatctttaatgactgtattagttaaacattgttcttacgacatttttttttatttctttgttgtagtttacaagatgtttttgcgtttttttttttcagtatcctcgattaaatcggtttttcagtttttttttttcacctacaaaaagattactccattgtcaactatttcatccaatcttccattataaatacttttgaagctgaatattcataaacccatccggtttcttctatctaaaattgatcgacatcctcaaaaaacattatggcatcttctatagaaatcacgtcagtcaagttgatgaagccaaagatgaaaactttggatatgcc

SEQ ID NO: 75 - DNA, 3075 bp, Poplar sp.
ttttattactttataaagtttaataacataaattttctataaatttattttttaaactacatgagaaaaaaataaactataaaaaaagtcaagttgaattaaaaaaaaagaagacaatccaccaaactcgtaaatcaggcaacctgagttaccttggtaaacttgtaaactacgctaacctcatataaagacaaaataaaaagaagcaaattacaaagttaaattctctaacaatctcaattttaaaagatgaaatcaatagaaacatatttgagaaaaagttatcgtaataaaaattcaaaaacaaaaaacaaaacattgtggactataatataatcaagttcgattaggaaaaaaaaaaataccctactaaactcacgaatcgggacaaccagagttaccttgtcaaactcacaaatcaggtcattgactccacaaagtttaataacctagttttttaaaattattttttatttaactaaactttttaaaaaatagaccatactcaatgctagatatttctttgataccaactcgatgctgaaatatttttttgatacatcaataattatataaaaatataaattaaaataaattatcaactctaaatcctcataaatacatcgtataatcataaaaggattgaattaaaaataaaatcaataacttaatgaaaaaaaagcatcaaaatgcaatccaaaatgttaatgggtgttgaaaacaatattttatctacatctttaactttatacttaataataattaatatttaatttaataaaatattaatattttgttcataatttaaaatgaccagtccatttttttgttccaataaaacaaaatacaatgcatcttattatcaataagagttggtttagaagatcgtgcagcgtggttaaaactatttatatatataattatagttttaaaattatttgattaatcaatatatattatagtgttacttatttgtttttaaaattttaattgagaaaaaattataaattataattgtttttaaacatgttttttgaaccttaaattgcaaaccgcaaaagctatcatatcaaacacacaccatgtatttgataatataatctattgtattttttaaataaaaatatatcaaataatttttgtatttttaacaaaaaaatattaaaaccatcaataatcatataaaaaaacagttcgagaataacttttaaaaaacaagttaaaaatttatcattttcattgttttgaagtagaaataaatgcgaggggctcgtagtggttgtgattcttgtgaaagccagtaagtaccaaggtcactgtttcctaggttagaaaataagggcactctctcttgtcgagtacactaaatttatatcagattttgagatggttgtcatcaaagcgtgtctgaaaaggaggagcaggagacaggtgggaaacttaaatatggatttgatgtctgattattccttctacctaagatattgatggtttttttttttttttttaattttagtttagaatataatttatagttttcttttaatttatatttaaaatttaaaaatcattgtacaccataaaattatgaaaccattattcacataatactcattctacataataaaatttaaaatttaaaaattatgattcactattttttttaaatcgagttttaaattaaattatgtgatagttatcctgatgtgatcttatttattagataagtcagaaaaaacattaactcaataatgaaaaaaataattaaataaaaatctaaaattaaatgataaaattgaaataaaaaatctaaaaatagagagtaaaaaaatctaaagaaagtaagaaactcatattaaatgataaaattaaaaaaaataaaaaataagccaaaaaactttaattactttaattacatgataaaaaatacataaattgatttactatcaatataatactgaaaaataaagttaaataaaatcttatattagaaaataaaataataaaataaattttatattaaaaaataaaattaaaaaaaatccccaataactaactctcagaaaaggccataacataaactatttttctttgctttttacaaatgtccaacccaatactctatagttgtattgataataaaaataaaaataactagattttttattattttatttttatcatcaaactgaaatcattaaattaaaaattaaaaattaatgatgagattggaaactgtttccaaataatgcaaatcatttaattacaataatgtttccatttttatcatattttaaactagactatcattctatttaaatttaataaaatttaattataaactaactagaaaaaactatttagtccattttataaaactagaaaaaataatttataatttattcaatttaatatatataacaatcatatttttaaaagaacatgtaaaaatatggtgaaattattttaaaccatagatttaaaaccttatttagataaacttgtaaaagaatttaaaaaactttaagtttttttgaaatcaaaacaacatttgttttaaataaaagaaattcacaaaaaagtcaaatgattaggctcataatgacccggtcaatcaggtttttgaatgagttttaaaacgtaaaaaattcaattggaataaaaaaaggagtaataattcaaatttaaaaacaaaacataacataatcaattaattcttaaaataaaaaaggactgctaactagacacacgtctcaatcctctttaagaaaaagtaacaagaaccgtaaaaagcgaaaatgtggctttctggacatgtatgattgttgtagttgatttgtttgttttaaaaaattaaaatttttttattttaaattattttaatgtaataatattaatgataatttttaaaagattaaaaaaattattattttattatattaacgaataaaaaatattttaaaaaacaaccgaaattactttctcgaataaccttttatatatatacacacacgatcactgggttattgttctgcactgagtttgaactcatcaaggaagtgaaaagcagagaga

SEQ ID NO: 76 - DNA, 3000 bp, Poplar sp.
cattttcatccatgtcttccacgagagcatgatgtttgatctaagtggttaaacaaaaagaattctttcccagtttaatttctttaatttaaatcctaaaaatcaacatttagaaaaactggtttctcttgaacgataccactcccatctgtctaaaagataatagattctcacaggggtgatgatgatttagggcaagtaaattgccagcataaaaatgatagactccaggaagaaattccttttccttgtagccgtaagcttaagaatgaattccggggatgatcatgatcccgtcaccttgctttcatgcacaggaggagattccgtgactagatggtaactgggggccatcaatttgattggacttggagatttttgtagggctataagattgtaaatatttctctcgcatatcatatcttgtttctcgtaaatctttttctttttaagagtcattctggaaattatacgaacagttcatcgtctacctttcgcagttaaaacgtttggagtgcccttgaaggtttaatcatggtcatgggcattttctagttgggctaactaaatggaggggcaggctacttcagagcagagctacactcgagcgcaaaggagaaggggtaatcattgaatccaactaatgggattctatcaataagataaatcatttaaagtgaggttggagtagcagttataggttgcatatattaacctacgccaatcattttattttgtaaaaacaatattaaaatatattttttttcaatgttaataaattttgacaatcttacattgatcaattttatatatatatattttttataaaacccaatatttattagattaatctgctgggttgctcgggttttaaagatgattaaaaaaaaagaagggttagactaagactttaattgcatcgaattaattagactcgaacgttttcggggctattactatttttatttcttttattacgcatgtaatttttcatttttcctgttggaatttacctttaatcaactgcaaggcttaaaagaatttaatcttgcccgttcacttctaggctgggccgagtggctgggcaggctaccaatttatagacaccccaaaagcccacttcagcgcactcctcccacaagtgttcccacaaaatgggcctggctaatatggatccaactccatgggatcttcttaccaaaggaagatgatttccgcatacaattgcacagtaatgttaatctcaaggaatattcctgtggaactctctttttgaaaaaccccagggaagataaattattagtatgttagaaggaaataaatatatttttctgatatacatgataattatctcatatattgaaaaatggatcctgctgagaaattccataaattcaatagtaatattaatttaattcacttttttcaaagaaaatctcgtacattaaatgaggatctcatgcattgagcaagtgaatctgatacgtaaagttaggatatcatatatttaataagtggattcagtgtcagagcccccagcagccactgcttagcattaccagaactatcaattcgagtaaaaagctaattttgttcaatattttttctcaaaattatgttccaaatcaacgctccagtctaatgttaagtcccataaatctgacggttgaatgtttttgtaagagatttcgacaaaacctttaaatataattacctcggttcctgactagttcttacaaggaaagataaaaacaaaaaggaaaaaagaattgaaaagaaaagtagatgaaacagataggatgagagttttcttcccttctttccacaactgtcgcctgctgacatttatctcacaggtatcactgcctccccgttcaaggcaagaaatctaagagaggagcgttgcttgggtcaaacattattctgaaaccaaacacacgcgcatgaaatcgagcatagaacgttcgtcaggtctatcacttttcttcggtttgctcaacagattatgctgattcggtgtcgaatcctcgggggccaaaaatgccatagaacttcatcagatgcaagatcaattaaacaagcaactaatggaaagaagaggcaaaataaaatgatgatctcttgaaatgggaattgggaatatagaattcggaaacaatcccagtatttgaccttttcatttttaataatatattggagtacttgtgtttggtaaatggtatgtgcatcaggagaagtttttattccttcctgtaatctgatttctgttccacttcctctaatgggaagagtgtatcccatccagttttgtttgataggtgacgaggactgtgcacttgtgctaaaaaaagcacaaatcataaatggagccaagtagtgcaaaccgtgttctcaaaaaattttaaatttttttttgttaaaatttaatatggtttatatgttttgaatcgttttgatgtgttgatgtcaaaaataatttttaaaaaatgaaaaaacatcattgacatgcatttcgatacgaaaagttatttgaaaagcaaccgctaccacactgtcaaacactctctactggtgtcgatagcaatttcacattttatttttgggttttaaaagtatttttaaaagaattgattttttttttattttgtattaatatttttttgtgtttttagattattttaatgtgttgatattaaaaatatatttttttaaaatattattttaatacattttcaaataaatttttttaaaaatattaattactaccacacttccatccagcactactgctaagtatggaaagtcaagtgagtctccaaatgtggccatggaattctaccacgtaccttgaagctgttaccttctcatacaagcaattttcctaacaagataccttttatagatccagtaatcaacctatcagtactataaatgcacccactcactaggcaatgcatgttgccccaaagtcacatttgtgccaaacaccaacacacacac

SEQ ID NO: 77 - DNA, 3092 bp, Poplar sp.
gtaatggagttcggagttttatcaattacaaactatttaatccgagaaatattaatggaggtggtattagatgttcatgtaagagatgtaaatataaaaagtttctcgatacagatgttgtaacaatgcatcttctacaaaaagggttcatgaagagatacatgtgttagtttacacatagagaaccatatgttcctcacgagaccatagtagaaataatggttaggtcaacttcgagttctagcaacgtgcatggagttgtagatgataatagtaatccttataggaatatgattacacggctgcaatgtgaatgagatgcgttatgctagtcaatattcaatcgtggatgaagaacctaatccagatgcgaccaagctttttgatcttttggaagactccaatgaaccattataggatgggtgtataaattatagtaaattatcgatccttgcacaagtattcatcatcaagtcagatcatgggttgagtgagactgattattgaaaaaattattgaatgggcgagaagcattttacctaaaggaaataggttaaaaaataacttttatgctgctaaatccataatgaaaccccccggcctaggatacagaaaattgatatgtgttcaaacttctgcatgttgtactacctttaaaatacaaagttgaccgaatgtagaacatgtgagcatgctcgttataaatccaaaattagcagggaaataactcttttcgcacatagaaaacttatatacttctcaatcacacttagacttcaaatgatattcatatcaccaaaaactgttgagcacatgacatgacatcattcacatgatgtggtggatggagtgatagtgcactcttctaatggtgaggcctggaaacattttaatagagtgcatccttaatttttaatagaatcaaggaacgtgtgtcttgggttatgtacagacagattcaatcaattcaggttatttgttgctccttattcttgttggtcggtgatactcatgatttataacttgtcaccgaggatgtgtatgaggttgaagttcatgtttttatctatggtcatactcagtcctaaaagttcgggtcgaaatataaatggttgtctttgattgttgatcgatgagttgaagtagttttggttactcgaggctttgacttatgatgtatcgaggaaacataattttgttgccacgcaaattggtggctccgtttgtttcacatgcgaagtggatggtaagattatttttaataacatctattttttatttattgtttttttataaatatatttaacttacaacaattttctcttgctggctacagttcttggacgtgagttaagcctgatgaagctttttatgaaaacgcgcgtgcgaagtgatgacctctaaaaccaggtgcagtagctcgtggatagtcaagctcaacattttgcggtatgttggttttcaaccattttttaagttattatttttttgaatttgctaactgttttcatgatacatataacacccaattaaaggagagatatgaggacaattcttcaacctgtccggatctcgatctgaatttgtgattgaaggcaggttcgtccgatggacccgatagaaatcaggtgtacggtctctttaacactacggccaaggacttgcggacagcctgcaatgtttcagttgttggatgctagtaatcgatttggagcactcaaactccagagttcaaggtgattttagaccaacaagttcaaacttgaacgacctaacttgttttttataatgagcaactcaatgttgagatggccgaacttagctgatttataatgaagatgagatcacagatgggtggtatatgtgccctcttttattgggctcacggtccttgtgaagaccctcctcatcctccagcgcctctattctaaattaattgtatttgaacttataaatgtttaaatttataataaatattttattgttatattaatttattttattttaattattatgtacttatttttaatatatatatatattattgacggtgttaccgaaggattaagtttgttggtatattctagagagttgaaaaataattactgcaaatgtcactcccgctatttaatcaccgacagaattgcatatggtctttctgttggttatatgttagattcaccaatgaaaataccgacgatgaaaaaaaatcatcgatggaattatatacagtttttttgttggtaatatattatattcatcgatgaaaatatcaacaaaatgaagcaggtaaaatgaaaatatcaacaaaataaaaaaaaatttaacgggcttttgtggtccgtaaatccatcaataaacgtattactaataaactcatcgacaaaccacaaatgatcaatgagaggtttttttatagaacatttttatccattaatgtcgatatactaaaagtataaataatgacagaaaatttggtcggtagtggttattttgacctcaacatgtgagctggttcactatatatataggtgaaattgttctgtcttgttttcgtttcatctccgtccagattttgtatgagagcttatattaaatcatagttgctattttgtaagaaaatcatacatgttttttgtgaatttggcaattagaactatgctgattcaaatatattcgataggaggtatatttggatggcctccatgtgcctgatccaaaaatatcgaaaaaaagaataggaaagtcattaattaatgggcctaccttctctccttatttatagaaagtctacacttgttttcaacctttcacaagagaaaatataaacttatttgatttcagcattgaataagtaaacaaattcttttacaaattggagacgaaaccttccaagataatttaagataattaaataaataaaaagtggccaacttgtgaaatgttcgagacaggccacgaaaaaaatctatataaagcccatgatatccctctcaacttagcagcatcggaaagttgcgaggagtaaagtcttgtggattacacaaaatacagactgaaaacatccataggcaccaacacataaaccatcc

SEQ ID NO: 78 - DNA, 3042 bp, Poplar sp.
taaatgaattgacttttaaaagtaacatttcattgttcctttctaggaatttgaatatattcccacgcttgatgttaaatatgtttaaaaatatttttagtttgaaaaaaatattaaattaatattttttttaaaatattttttattattttgacttttgggtctggtggtcaagccaaacctaatagccttaggcctgatagtcatgatacaaccacgacagttgggtctagtagccaagccagactcaatagccctatgtctggtgtccatgtcacacccaagacagttgagtctggcggccatgccacacccacgacagttgggtctatcggccaagtcagatctaatagcattgagtctggcatgactgtcagacccaacaccttttggcataaaagacaacaaaaacaatgcattcatgatgttacagtgttgtccacagtacaaacattttatatctataatgtggtccataaggtattgagtctatatccacagtacctgtatagtgttctggatctggaggccacgtcagacccaagacggttgggtctaatgactaagtcggatccaagtctcttgggtctggcggccgagccagacctaacaacttttggcataaaaatagcaaagacaacgccctcacggtgctacagtgtcgtccacagtgcaaatactttatatctacagtgtagcccacaatgcaatgagtctatgttcatagtacctgcacaatgtttttcccatgcattttagagtatagtataatttgtcatattagttggtgtttatgtgacaaaatatatctgataaatctaaatttaacgagcctaatgttgggcatgctgcctagccaaaaggaacggaccaaggttgttacggggcccatactagatgtgacacgcccaactagggtgttgggtgtcaggcgagcaccctcatggactcgggcccagctaccacggggttagatagcgtgtttgagcctatttttcactcctatcaggttcaaaaaacttgtttgagcccaacacttccttggaaatttttccaagacccaatgcgagtccattggtaatctttcgggtccctcatgcgagtcctcccagtattttattttgatccgatacatgttagtttatatgggtgaaattactcagcagtccctcttctccataaaaggataggattcatgatctataaataccatatgaatccaccaagttcaaggttcacaatctcttcattctcaatatttttgacacatatattttcggaacctatctctatcaaatattattgagctttctctctctataaagttactgacgtaagcatctaaaagttcctgcgtccattaaaggagacatttcacaggtatttggcttcccatatcaatctacaagccaccttgcctttttacatcaaacggataagattgcaagaactaagtgattaatcaattatctaacacattagacttattactaaactacttggatttttaagatattatcaatatctcttcttataaaataagtttaaaacataatattcagaaaattaaaatttaaaactaccttgtttgaaaaaaaaagtcgatgttatataaaggaaaaaaagttgttagaaaaatttaaagatttaaaaggaatgtgatatttactaattttccatcatgatatacaaaaatatgttcatttaatggtaaagaaaaaaaacaatggttcacatgcaaaacatgtgccaagtactactgacgtgcaagttgtgcgagcataattttagtcatgtgtaaaaaccagcaaatgtcatctcctaacaacgacaaagttagaaattatgtgctggtggctagcaaatatattaagaaatatatatatattttatggatcgacttattaaaatgctaaaatgtagattaaataaaatttggcccaaatgacgaaatatcttgtaacttgttttgttgaacttgtatgtttatttaattaaatgaaatgttcaaaacatagttttttaccatatatatctagctagtatttcaatacaaaaatataatataaacatgtttaattgaagaaataaatatataaaataagtttatttcttaaaaaaaataagtgaattttgttgtagatgtaatttttattttaattatagcgtttgatttttatcttaaaagagtaataaaaaaccaaccaagtttttttttttttaaaaaaaaggcaaaatgcaaagatagcactagtatgttatgatatataaattaataatgaaaatacataaaaaaatttactatttagaaccaggggtgatgggacctatacagacttaaaatatattttcataacaattaaaaataaataaaatcatggataggatgaaattaaaaaaaaaaaatctttagattctcaatatattttataactttcatgttgaaaaggccaaactaggagactttaattgcatggctatcaatttaactagaactatttttattccttttattatgcacgtaatttcgcatttttcatgttgaaatgtacttttaatcaattgaaaggcttcaaaaatttaatcatgcacatccatgggctgggcctaaaacccactttaggtcactactcctagtcctagaagtgttctcacaaaatgagcctggcccatttcaattcacctcgatgggattttcatccactatgtccaataaatgcagtttttgaaattttttaggtagtaatttgataagatacatttttttaggaataagattagcattactactcataatttattgggtatgcagagtaattggagaaccaaaaattgtttctctgtacgacagcgttttatagatgctgctaattcactaatctctctatatacatgcagccatgcaatggttattgcctgttaccccaagagtcacattgtgccaaacacaaacccatggattctctccaatctcttcaaatttctccgatgctttttttcatcttggtctctctatctgtctccataattgtactgattccg

SEQ ID NO: 79 - DNA, 2612 bp, Poplar sp.
ctatttaacaacaagggaccatttcgtgcatgcaaacatcaggtaggtgttcgacaccttgaggagaattaatttattatctaagtagtagtcacaatcactacaacatttaatagttttaccgacataattttttcatcggtgtaagacacatatttcatcgataattaatttaccaacgaaattaccgacagaaatgcttcttcggtgaatctttcatccgtaattttttgtccatcggtaaatccattggtaataaaaaaaatattattaccaacggatttactgacggaacagacgcgtaaaaataaattacccgcttcattccgttggtatatctctcaaaaaataccatcggtaattctgtcggtaattatttaaaaaaatccattttataaaattataaaataattaaattaacataaatcaacactctataatatatactcaaaatgcttggaaaaaagaataagaaaatcaactcaaacaaatttgcaacaaataaaaatctcacagcaacatttatacaattattaagaacaaaaacaattaaaaataaaacaaaaaacaaatatagtgaaaaaaatcatggaaaatgaagaaaaaggaaaaatcttaccttaatgtagttgcatgtgaagctaaggagagaaaaaaaatttcgtaaagcatattaattaaaaaaaaaaactaagaggataaaagaagaaagaagaagacatacctgagcatgaaggagaagagaaggagatgaggatagaggagaagagaaagaaataaatattgatgttttttacatatagtgaagaagaagaagaagaaatgagtctgtctcttgtgaaataaggggattcaggctttttattgaggcgcgttaccgacggataattaaatattaatattttttaattattctgtcggtaattctgtctgtaatatttaatttaaattttcaatttcataaaaagttttcagaaaccgccaacaatcatcgatgatttttcaatccgttggtgattccgtcggtaatatttaaatgaaaaatttaaattaattgatttttttcagaaaaccaccaaataacatcgacgacttttcaatctgtcggtgattttgtctgtaaagaacaacaattaacagtgcaattggaaagtgaatagttctaaagctctctggaaaatactgacggaattattcgttggtgattctctttgtaattgacatgatgaacagtgttcacagtttaccaacgaatttaccgacggattccgtcggtgattccctttgtaattgacttgatgaacagtgtttacagtttaccaacgaatttaccgacggattttaccgacgaaataaattttgttggtaaaaataacacgtcatcatttttttttttgctttattttaatttttttccctactgtaattccctcggtatttccgtttgtatttatcaattttctaatggtgaattttctttaattgtatcttgatcttaatagaaaaatataacaagaaaaaaattggagaactaattcgctcgttaatgaaattcatgtcctggttaatgggtgatttgagaaactaattttttggttaatgggatcaatgagcaattggggaaactaagtttctagtgaatgagattagtgtcctagttaatgaacaattaaataaccaatgatttagtaataaaataaaatgatttagtaataaaatttatgaatcttgatcgatgatggccagctgttaggttttataataaaggattacttgtgaaatgctcaatcacgactagagcactaacaataatttttgggattaaaaacatgttaaagattgtgattcaaaatatttttaatttacaaataaattaaaatattattttttaatttttaaaaatcattttaatttgtttcagaatatcaaaatgatatgaaaatatataaaaaataatttttaactaaaaaacaaaaatttaaaaatttaaaaaaacataatttgcaggtatttttaaacagggaaataagctttcaggtcaacgtacagaacaaagattagaaattggtatctcagctgttcctggcttcctaccaaaagctgaaattagaaagaaaataatgttaccgtttccgttcacttgagagctatgattaaaaaaactgaatcaatctgtccttttcacttagtaggatatgattaaaaaaaacaaaaacaattttttgactctttttttcctctagtttttcatgcttaaagagaaaagctaaataaaaagccattatactatttctaccaaaacatgatttattgtaataatttttttgactaattttctaaatgaatttttaacattagagtgcatataaacaaaaataaaatctcactaaatttgtttttcacaattgatccctttcttcgaaagaaaaaacaagaagcgatacaaataaagacattgaacttatccccagtttgtcttcttcctgttatcatctccctatttacgactatatatatatgtagcatcttctctataagaagcaagagttggatttaggtttgctttcactaagatagagcaaagaacccaaccttaataaatcagacacagc

SEQ ID NO: 80 - DNA, 3000 bp, Poplar sp.
aaacttgattatgtaaggtaaattaaaaacaattaagaattgatgtctaaattgtaaattctaggttagggttacaagaaaatttaggggaagtgagagattggccttgtttgatgaaattgggatagaaatagacgaaagcaacttagaataataattaaatgaagaaaaatcatagtcttttggaagctagtggtgccagccaaatattaaagaaaaattaaaataatacatgaatgttgtttgtttgaggttattgtagcacgtgttgaaatgtggagaatataatttacaataaatagaaatcttgtgtttaatttgtaatggaaatattggttatgctttgattatgaatgttgtcattttgttgagaattgtaggattttgtgtaatgttgaagtattatggaaaattatacaaatgagaagaaaactattcatattccttctttaatgttacattcggctagagagagaaagaaaagagaaattgtccagaacaaaaaatagtctagctattttgagaaacgactagacctatttaagaacacgataagactatttgtcaaaatgattagaccgtttttgttattgtccagttttggaattttttttatctttttctagttttcttcagttcttttgagtttgttaagggagatggtaatcgtttgattgaatttagcataaaatgtatttttaattatgatggatgaaacacttgatgtgaggttgtaacaattatacatggtaaaaatttagaattttcaatgcgattaaattgagaattcaaaatctatatggagaataaaattgacctttatggtggatgaatttaccaatgaaatcaccgacggaaatgctccgtcggtgaatctttcatcggtaattttttgtccgttactaaatctgttggtaataaaataatattattaccgacggatttacggacgaaacagacgcgtaaaaaaaattacccgcttcattctgttggtatatccctcgaaatataccatcggtaattatttaaaaacattttaaaaaatccattttataaaattataaaataattaaattaacataaatcaacactctataatatatactcaaaatgcttggaaaaaagaataagaaaatcaactcaaacaaatttgcaacaaataaataatctcacagcaacattgatacaattattaagaacaaaaacaattaaaaataaaataaaaaacaaatatagtgaaaacaatcatgaaaatgaagacaaaagaaaaatcttaccttaatgtagttgcatgtgaagctaaggagagagagaaaatttcgcaaaacatattaattaaaaaacactaagaggataaaagaagaaagaagaagaagacatacccgagcatggaggagaacagaaggagatgatgatagaagagaagagaaagaaataaatattgatgttttttacatatagtgaagaagaagaagaagaagaatgagtctctcttgtgaaataaggagattcaggttttttattggggctcgatagtgacggaattacggacggataattaaatattttttaattatttcgtcggtaattctgtctgtaatatttaatttaaatttttaatttcataaaaagttttcagaaaccgcctacaatcatcgatgattttaaaatttaaaaaaacattgtttgcactgcgtttctaaacatgccctaatcttgtttctgtccaagtcgatgtcattgcccttacaaaataaaagaaaaggcagtcagctttcaggtcattttcattccagcaatgttcagttaattttgccataattaagttcctgtctcttaattcttttttccttcgtaatttataggaacctgaaacattggtttagaggataaattgtgtttggtagagtagatattattttcccttgtctgagaggatggaaagggagctacgagaaaattgtcgtccatgactgccttttttatctccccgaaatggatagaatgagggaatgatgatatggtactttctagctctaacccttcgttctcctgtaaatcaaagcatacgatataattttgttatttttaattccactctctttttcttttttaattaattaaatataggcaagaactggacacttaatttacaattatttataattacgctcttccacttatatgagaaaattttaaatataggttttttgcgttttaaaagcgattttaaacaaattaaaaaaataattgttttctttactttaaattaatattttttttggtgtttttagatcattttgacgtgctgatgtcaaaaataatttttaaaaaataaaaacatattattttaatatatttctaaataaaaaaacaaccgcaatcaaactttaattcacgcgtaacccatgtcaacgtacaaaacaaagattagaaatcggtatctcagctgttcctggcttccaaccaaaagctgaaattataaagaaaataatgttacaagggtctcaatctgtacttttcacttagtaggatatgattaagaaaaaaaaaacgacctaaagtagcatcacttagtaggatattatcacttagtagtttaatttatcattaccgtttccgttcacttgagagctgtttatctctctggtctagccttagagcaaattggattttctaaatagttttctaccatattaaagtgcatataaacaaaaataaaatcttactaaaatatgtggtttggctttaggtagataataaaatctcactaaatttgtttttcacaattgattcctttcttcaaaagaaaaaacaagaagcgatacaaacaaagacattgaacttatccccagtttgttttcttcctgttatcatgatctccctagttacgactatatatatgtgtagcatcttctctatataaagcaagagctggatttaaggtttgctttcactaagatagagcatagagaccaaccttaatatattagacatagc

SEQ ID NO: 81 - DNA, 3000 bp, Poplar sp.
ataacgggaatgcccatatgtcatgcactcggtcagctcagcattttcaaggtagtataacatgcagaagttagggcacatgtcaattttttagtatcctaaactgaggggtttcatcatggacttggcagcatagaagttctcttttagcctgttcccttcaggtaaaatgcttctcacccattcgataatcttgtcataaccgacctcactcaacccgtgatttaacttgatggtgaacacatgtgctacggctgataatttactgtggttcgtgcagccatcccataatggttcgtcagaatctttcaacagatcaaaaaaccttgctacatctgtattacgttcttcttctatgattggacattcactgacattaccttcactcattctcattgcatccataaccatattcatgtaaggattattgttctcatttccaatttcatgcatattgctagcactagaagttgacccaaccactctttctaccatgctcttattaggaacaaatagttctctatgtgcataacaacataggtaatcctccatgaaccatttggttagaagatgcatcgttacaacatcttgatgcagaaactttaaaattttacacttcctgcatggacaactaataccgccatcagcaaaattcctcgggatagatgttgtgaaattaataaaaccctgaaccccgttacaataatccatcctccgcaatccttggggtgagtcccaatacatccatgaacgatcatccatgacttctatcgaacctctataaaattatgacgacaaaatgtattaattaactacattacgtaaataaacataacaaaaatattggttttccccgacattatccaacaaactaaaaaaaaaattatgttaaatattcattatcaattatcaactatcaacgtccatacaaaatttatacatatataaatttacggaaatcacaacttcgcaatagaattcataacaatcaaaacagacccgttaaacaagctgttatttatttcatcacaacacatctaattcggtgtaattcaaacaaagtttcaacaatttacaaacaaatataatttgacaaaatctaaaacaaactataacaactacaaaattatacattcatactacatgtttctttgacaaataacaatcaaacaagtacatacgttaacaaaatacatatactaaaaaaacaataaaattctcatttaaatgttaaaactatataaaaaaggataaatttacttacaaaaaatgataaaatccacaaaaacggatgttgtgaccacgtacaaaattataagaaacttaagtgcttgtgttgagaagaggggagagttaggataggtggttggttgcagtttggaaggggagaggtgggatggggaagaagaaggagaaatagaggaagagagtgtcagcagagtgggtatatattgacttttaccgatggaatcaccgacggacacgttccgtcggtatacccgtcggtgattccgctggtgaaagtgttacatcactgtacggatatcccagtttgaatccctcggtcattccgtcggtaaaatcgtctgaaaaaaatccatgccatcacaccgttgtaacttttcaaaaaaattgtatagtccatcggcgatacggtcggtatataccgacgaatgtatttcatcggtatataacgaccgtatcgctgacggatggtatctgtaggtatataccgacagattttgagacggaattatatccgtcagtaattccattggttttcgccgattttctcatagtgtcgattgtataaaatttagggttgttacacgacaaatcaactatatccaaggagaagataatcttattagagatagggagaaataagaaattacatatttggaggaagagaatgatcaactcgactcaactcccaggttttcacacccatcacttcccttacagttgttgcaaataacagctttagttgctgccctcagcagctcctgaaaaaactttactctataaaatgaatttctctaacccttcgttctcctgtaaatcaaagcatacgataattttgttctttttaattccactctctttttcttttttaattaattaaatataggcaagaactgggcacttaatttacaattatttataattacgctcttccacttatatgagaaaattttaaatataggttttttgcgttttaaaagcgcttttaaacaaattaaaaaaaaattgttttctttgctttaaattaatatttttttttgtgtttttagatcattttgatgcgctgatatcaaaaataatttttaaaaaataaaaaatattattttaatacatttctaaataaaaaaaataaccacaatcaaactctcattcacgcgtaacccatgtctacgtacataacaaagattagaaatcggtatctcagctgttcctggcttccaaccaaaagctgaaattataaagaaaataatgttacaagggtctcaatctgtacttttcacttagtaggatatgattaagaaaaaaaaaaacgacctaaagtagcatcacttagtaggatattatcacttggtagtttaatttatcattaccgtttccgttcacttgagagctgtttatatctctctggtctagcattagagcaaattggattttctaaatagttttctatcatattaaagtgcatataaacaaaaataaaatcttactaaattatgtggtttggctttaggtagataataaaatctcactaaatttgtttttcacaattgattcctttcttcaaaagaaaaaacaagaagcgatacaaacaaagacattgaacttttccccagtttgttttcttcctgttatcatctccctagttacgactatatatatgtgtagcatcttctctatataaagcaagagctggatttaaggtttgctttcactaagatagagcatagagaccaaccttaatatattacacatagc

SEQ ID NO: 82 - DNA, 3000 bp, Poplar sp.
attatttgggtcaacctaaagctcctttgacccagctctttgcttgatatgaatttcaaattaaattgtgtgaaaattaaaataatatgactctaatgatttgattagtctaattatgatctaatcgacctagtctgaaaccaactttaactaaaaaaattatagactttattattttttatatatataactattaacacgaggacactctgagtggactcgagtcttaagatgtgacctagataactcggtcaaccaaaccaaaacttaatttgcttttaagaagaaatttaaatgaacttaatccaacgttttctttaaagaaaattatcctaaaatttttataatttactccattttataatatatttttataattttaaaaattatagtaaacatcccaagttttataagttaataacattttatacagaaaaataaaagaatcaacaaaaaaaatcttatcaagtattacatgaaggaagacatgggtggattttttgtggccctgaattaaatgtgagaaaaatatacaagagagaggacaaataatattaatattgagcccagtttggcttactgtctcgccgtgattagagaaacatcatcatatgccaagttaaaatcataggctgatggtccagcagtttactgtaaaatcatagactgggtcgagcatcattattatcaatgcctgcaagttctctgtgtggtaatttttttgttttgtttttaaaagtaatttaattatttaactgtttttttttaaatgaaggattaagatgcctctagatcctaagctaattttttttttgtattttaaggataattaaatctttttattgtaaaaaaataaaataaaaagagtaatttaacctcaataaatttaataatgttaatcaaatctcgtgaaaagattaatttgtgcctcaacttgcacttccttgactagtaccatggagagcaaaaccataattgaactgtagcaattcacaatataccgagtcttggtctaccgtaattgacttagcctcattagttttttttttattatttgatttagttttttaaaaaataggtttgttttaaacaatagtgtatgttattttttattagatttaaaaaattaaaaagtattgatatttagagtttattaaatcatatatatatatatatatatatatatatatttttacatttcagctgtcattttaagataaagaaaccataatatttttcttttcactgtatgctgatcataatcaaatcgagaaagagaatcgcaataactggctagactaaattcataatcaaatcgagaaagaaattcataatctaggtcatgagatcaagataaccccataaaaataaaataaataaattataaaaccccactttcaacaaattcaatgttgaatgttgaaatcgaaagaaaaaaactaaatccatgagataaggataatacaaccaaaagaaaatagaaaaaacattatgaaacccaattcccaaacaacctaatattataaagaaaaaactaaataaaaaaataaatgagttgttgaaaggtgaaattgaaaaaaataataattaaaaaggacccaaaaaaataaaccgtgtcatcccatgtcaatctaccaaacttgcgatccgggttatgagttgttggaaggtgaaattaaaaaaaatcaattaaaaaagaacaaaaacaaattaatggttttttttaattgtttcccaacaaacgatgccaattgataatgtttaaaaattcgatatgctttggaataaagttttttggtggttgaattatatgttaattaaatgtacattcaaatgactctttttttcaaagtgaaggaaattatcttttgatcataaatacccctggatacctataaaaagttcttttttgggggatttaaggatcctccgatggtaaaataggtaatcttatagagaaaaggagtaataaatatgcttgagagccttaaattttaagaacaaagtgatttttgtgttggatatatatgttttttgaatgtaaagtcttgaacctttcacctagatagttcaaggggtatttataacccttgaactttggcttcttcttgagtggaggagttggagaataaatttacaatgataatatttataaaaaataaatatctattacacatacattaataagagaagattgcattaatgaaggaagaagtaaaatgggtttaagacactcactatgtccaagaaaactaggccatgttaatgggttgaaaaaatagacaatgacccaaaatgaccaggcacaacccttgggattgggctcgggagcaccactcgagcccaaaaaatgttgcgcttgcgctcaacattgggctcgcgttgtgcactcaagcccataacaaggtgctggggtcaggtatgcaacccgagcccacaaggtgttagatatgagcctattaattgggttcatgagtattaatggcttatgctaaaagtaaatatctttatattaaatattaaaaatgttttgatgaatcttgatccatcaacagtgattaaaaatgtctgttaggtttgtatcaattaaggattgcgtgtaaaatactcaatcacgacaagcgcaccaacaataatttttgggattaagcttgtttctgtcctagctgttataataatgttataagggtctcaatctgtctttatactaacattgatgtctttttcttaattgatttcctcctactagtagaattggtggaaccaaattgagacaagtaaatgagttcagatatccacaattgatccctttcttcaaaataaaaaacaagaagcgatacaaacaaagacattgaacttatccccagtttgtcttcttcctgttatcatctccctagttacgactatatatgtgtagcatcttctctgtatgaaccaagagttggatttaggtttgctttcactaagatagagcatagagaccaaccttaatatattagc

SEQ ID NO: 83 - DNA, 3000 bp, Poplar sp.
tggagatgtacaccaggtctgctcctgttgcctattgctaagacttcacaactttaatacagcacatagggtgctaaatcttaattagcatggtaactgggttgttctgcatatataattagaaatcttaaattctttctctggaattgcttctatggacatgcaacactgaagaactaaaaggaaaccttggaaaagaaacctgtcatcattgaacaggaagtatttgtttctgaaggctttctttttagtacataactggacaatgccttatttgggtctctactcctttggagtgcttttgtgatattagtaaatactttatttgttgtggtttatatgtgatgatgtttagtaatgctcatctattggctgcagagccattaaacttgactcacttgtctactgacctgatttcagaacttgttttgtgatgacagcccctgcatgtaggtttccttggagatttgggaggaaacacaatacaagtccattggtaccgtaggaagtcaaacctgcaccatgtaagcttttctgtagtgtgttaatctacacacgtggaggatgattcccgtataaacaaagagaatgttttgagacagtttatgtgcatggaatggatttggatcctctcatgttcttgagaacatgatgaatcgtgtttaaattcaaatcaataattatattttagcttaaattcaagtaccttgctaattatatatctgaaaactatgtaaaagatcaagtttaaaaacgattcatcatgttctcaagaatttgagagtatccaagttggtctgtcaacaagcaatatatagcaatgcagtcaaggcaactgatttcttttgatctaaatagaaaagcatcgtggactttaatgaccatcaaattactttgacatgaccttttatgctcattttgttctcttcaccaactcaatatggtttccaaataatggtcatcgtttatatgtttctggaacaacaaatgctctttcccatgtgtttttggatgtcattagcattatatagtctcctatatcagtttcaatattgttactctctctctctcaggtatgggacaacatgattattgaatcagccttgaagacattctacagttcagatcttgcgaccatgatacgggccattcagaataatataacagtatacttttccttctaacctatttctctgatttataattggaaaatagcatgtacattggtatcagtagtgttgaaggacagtactcgatatatctgcttcttttattgttctgaattgttctatataaatcacatgaaagttataacttggggatatgaatttgttgcttcacaaatttttattttgtgcgagtgcatgctcttggattttgcttttgctttatttatttgccattttttttagtgagaagctttttttgattgctttatttcattgttgataggaaaattggtccaatcaacaaccactatgggagcattgtgcacacaaccacacagtctgtccaaacccgtaagtatattccttttcccttgcatgcttcatctgcgtaatggcagacatgtaaattgtaatagtgcaatcaaccatgcactgaaagggctattttcggaatggtgaaagctttactcgtttgaaactgctgaaacacataagcatgtcaattctcccatacagagttagacttgattgctcgagatgcaagtttttcattgcattcggggaataaattcacttcatccatcagttgcaaggagttggtaactaatggcttgatccttttcccttcaaattgtgcagctatgcttctgaaagcattagtttggcatgcaagtttgcatacaagaatgcctcgcctggaagcactctggaaggtattctcttcaatcaaacaatcaataaattttagattcttgttacagaagctagatcagggtagccttgcatatgattaaaatgtgactcatgtaaagcttattctcatgagtcttgcctgcttcctactggtgcaaagcgtgccctgtaggttgttgatattggttttattttattccaagtaaggggggaaatgccatttttgttatcacaactaaccttgaaaatgctatatatttgtgtttttttacgtgtcattttatcccatgaatcattttatctctatgctcaaagccgcaaaatcagaccttccaatatttgattggacaatgcaaaggtctttgtagtcaacacaatatcgtatggacgtttggaccatgcttctcatgtatttaaccatgcacatgcccagttcaatccagcatgttatgcatgtggactgcggcaaactcaatccagcaagttttttaacaaatagactgttttctcacgtcataaactacctgaatttcagccgcactctgttaagaatagtttttaatccttgatcttttgcgctgcagatgattactttctttcccggctgcccgttgtggaaaagagactagcccaagggggcattcggttagctgccaccctgaaccgcatttttgcttcttacgtgaaaattgctcaagcatgaagataaagagagaaagaagcatcttcagttgcttacacagagcggggaccaccgctccaatttatatatagcacgaacttaccttatgcgtaatactttactcattgtcagctctgttgagcaagctccgaactaatcttttaaaccaattcttgatttcattcctgttatgcggtacgcattgtcttggatattcccgaatatgcccttcttgcacatggaaaatgtcaacttgaagggtactcaagagtggaatttaatgcttgtactcaataagaacccttctttctttattgtgtaaatgtaaccgaaccttttctaagctttttatatatgtatccaaaactcaaattagtggctcatttcgtttctcatgttttgtgatattggaggaagaaaacatcaagcagttcaagctgagaaaaaaataaagat

SEQ ID NO: 84 - DNA, 3000 bp, Poplar sp.
atatatatatatatatttgtttttttggatcgagcgaatagtccagcataaaacacacaaattaattgttttttaatggctatttgtaagtagagatttcatagttgttaataattttaaatgatatgtccagcgatcagtgacgaggttgtgaaaaataatacgaccaaatcataattaacgagcaccccatcaattcaactacttttgggttttaggaaattgggaaaaaaaaggttgaagaagaaaattctaaaaataaaaagaaaaagacaagtccctggccttagggccactaactattttgttttatttgatcctgaataatttttttttttttttagtttatatcagccttgtggttgctgcagctccctccaatttagatatcatcgaacagatggcactgtaattactggtattaggattgcgacagcacaccatacatggcataaataatcagctagcgtcataaaatcaacattaaagtcaaattaattagtgaacgatttatattgtttcagataattaaataaacttcgaccagtagacatatttaggaaatttatagtggatgaggaggaggaggtgggggcaaagaagacttcaatggcagcaccctaccaaccacaataaaataaaaataaaacgggggtggtaagcaggcttttccactgcaaccaggcaagttggtgagaacaagaggaatttgcaagtacaagaaatgtaagaacccaacctatcacaacccgaaaaagtaaacgttaaccaataaatcttttaatccaattatttgactggctcgtgtgtaaaattaacctaagtaaatattattttgatatgagttaatcatctagaaataacctggataatgaataaaaagtatggttagatttttaaaaaataaatttaaaataatatttttttaaaattaaaatgataatatgttgaatctacttaaattttatagattaatctgctaaactcgtaattcaaattataaactccattgaatccaacagctttatatttaatgatacaataataaaggataaatatttttaaaattaaataataataaaaatagaaaataattatgagaataatttcaaatattaaagaattaaaaaagtggaagatggattccaagaaaaagacaaaaaagggagcaacacctttattgttctttgtatcccggttctttcagcacaggagataataattaaagattaggagtgtctcttacaaatacccgaaaagtctatttaatatattttgctagcaagcaagcttgcttgatggcgacctatgaaataatgacgatggctacacgaatgtgaatccatggatgcttattggctagagtgttttcttctctctgcattattatttttttgtttgcaattgctggactctgtaggattctgatgcgaggtttcaaaatattattatatatataagagaaataccatacatttcataaaaacaaactgtacctgtgatttgcattctataagaaacagtggtgtgcagtgcagcccatggggggcaaagggatcgctgcaaaaaaaaaaaaaaaaaatgatggaacgtccaagagataggctacagatgtaaaggtatgcacaaaaaaaaccaaaatggctttcaaattgtcaagtaatcaatggagtctgggaaaaagaaatggctaaagagctccacattacaagtgaagaacggccggccatgagttgaatacttcctgttaatggttaccttgagttcatcaaaaagtgatattattttaattttatttttttaaaattaaatttagtttcgattgagttatgaaataattcaccatgttatttgtatttgactagattatctccagcctgatttttttgcacccggtccgagatagttctaaatttagccaggaagcacactgttcaggccgttttaacacgcaagtagcaaaaagaagcacatgattacaattaataaattttgctcgagttttcttctataatatttttgcctggcattgatccagccgacatgattcttggatttaccatgcactcgcaatgaaaaatcacaacttgatataattaattaatataaaaaaagaaatacctaacactaaggccgagttagaataatgcccaagtccaatagcttgcatgcatcaacttgaaagctaggatgacgggaaattttataagaaataaaagagaaactgtagaaattcaaaacaatccggaaatatctcatgatatataattatcactatttattttttaaagggaaaataactaacaaaatcaatcgagttacatagcatttccgcgtgtagataaataaagaaaaaaaatggatttttttctattttcaagtaaagatatgcatggatgtgttcgttgtaattccctctgccttttaggtagatatggtgatttaaatttcatggcagaaaaatcattgattaaataataagaattagagccatgacgtagtgctgatgtgccacttctcaacaacccccatttctccccaaccttctatctttttgacaagaacaggaaatcctccgaattatgggacccaacttaagtgcatgctacttaccacaatatcccaagtgtcacaatcccacccattgaatcccatgataatccaacggccacgtacacttctcaactaacacatcggccaacccaccccaccctctacctgcctgcccctccttccttctctatttaaagcacctaaattttggtgaacaaactcaggatttttgggtaacctgaaaattcctacatacatttagagcctcgcaacttcaattttttcttactatacaaccctcatataattttttacgccagaaaattctttgtgctcacacatccgttcttctctctcattttctctttgatcataccaatcgatccatcactctttttttgtctctcccccattttggcatagaggatcatcgctttacagggaaaa

SEQ ID NO: 85 - DNA, 3214 bp, Poplar sp.
atattaaaacaacatgataagattcaagggttatatatatcatggaactactcagtaaatatattatttatatttttttattttctaaatatttataaccgctaataatatttttaaacgatatgttctaattaatgataagacaatgaatgcactaagattttatatatatatagataaacaggtctctggtcttaagtccactttcttgtttaatttcctgaatatttttaatctgtgattgttgcagctccaactcagataatatcaaacagatggccctgtagttaataccggcattgagacagtgacggcacaccatacatggcataaataattagatagcataacaaattcgacactaaatccaaataaattagcgcttaatttatattgttctggcctgggtagatgaacttcaacgagcagagatattcggaaaattaattaattatgaggatgacgagggctgtagggcaaagaagacttagtgacagcttcctaccaaccacaatctaattaaattagaacggggattggtaggcattccactacgcaagttgatgtagaagtacagaaaagtaagagtccaagcaaccaatattccaagctcaaaatgcacacaggctgcatctttttcatggtttctgggcagtaaagaaaggtaaaagggatgcgaagtaattcgttcatcgtccacgagatcgctacgaatgcaaatcaagggatgcacaaagaatccgacacaagagattgaatattaattggctgtcggtcatgtggttccgagctgtcaactgataaactcttaggctgagagataaatgcactttgggactccaaatatccagttatatttacagtgaattcatcgcacttgtcgtctctgtgcagtccttctggacttggtttttcctgagttaatatgtagggtattatctggtactgacctggccctgacttctatgaagcgtttggaaacgtggcaggcggcggctttttaattttcttttctggaagtaatattaaaaatattacttccagacaaaaaatactttaacaacaattatcccataccatacaatgacttgctcatccaaagacccagctgtccatacgttagacatccattaataataataataataaaataataataatgcgctatatattctcctagataaatcacttgctcttccaactcccagcgaagcctgttcttttcttttgtgataattttattttcttgatttagctatgaagcccactgccaaggccgttttagcacctaaaataaatctgaaacccggttctggtccggtttttttgaaccaaaaaggatactgaacccacagctcaggatcatcatgcacatcattgtaaatgagatgtctattaaattttgagccacatgatagtattaaatcttgcactgtatcatgcacatcatgacgagtaataataaaagcttgaaaaccattatttattagaagagttacatctatataatagtgtttgggataatataatattacttgggataatgattaattaatatatttaaatacttgatttttttttaatataatgaactccaggctaatatatactggaagcttgaataactgcaaaaacagtcttgatggaaggaaattgaagattctgtgatgataaatttaatatatttattaaaaatatattaaatgatttaagacaagaaataattttaaagagctttaaattcaaaaaataatgatgtttatttttaagttttaagtgggttaacactctgaaattcatgtattttttatcttaagacatgaaaaattatgaacattttatctatataattcaggggatacttatacctcttaaactttgtcgttttcagataagtaaaattaaggctagaaagtcttctgttttcgatgatattaacgagagaaaaatatttcttacatatcattaatgacatagtaagtatagcaagtcccttaaaaaaaccttgtatacacctataagtataaggaaattattacattaacatgaatgattattctagatggagaagcaagacagtttatcatgttttttatatttatattgtagatgatcgtctaggatcaaacatataactttagaacttggtaatatctaagttttttgggtttgagatgtttgatggacatacatttccttatacatgactgactaccaagtctaaattttttaagcctagcatatttatcagaccaacgtttaacccatatttaccagactaactgttaagttcaagtttttgggatctgacatgttcgttaaactcacattaccttgagcttgtttaactgtcaaatctaaatattttgggttagacatatttgcctaacttaatttatttaataatattttttataaataaaaatcttaaccaaaaattaatccatcactttcaatatagtttcaactataaaaacgttataaatgacaattaagtcttatttttatgagagaaactgtcaactacacaacaatttcaaatctaattgtgtgagactagtaaatcttagttaatggattcgcaatgaaaccttctatctataacaccgtgtccttgattttctttccattgtaggtggacagcacaagatactgtgatttaatttcctttttttttttttggcaaaaaaaaaattgctgatttaagtaatggacattaaagccatgacgtagtgcttatgtgcccccttcccaccaacccccatctctcccacccttgtattttctcgaccggaaaacctcgccattcttggacccacctaagtgcgggctacttaccacagcattcacgtgtcaagatcccaaccattgaaacccatgatgatccaacggccacgtgcacttttcaacgaacacatcggccaacccacccacccctcaattagcctcagctcccctgcacactctatttaaagcacttgatttttggtgaacaaactcagggatttttggtgacctgaagattcctacatacacatagagcccagctatcttaatcttgcatgctgagcagccctcttgtattcttacacacacgagaaaaagagatatattttgagcacacgtatccattttctccctccttgaccaccgatcaatccataattcccttctttttcccatagagaatcatcactttcaagaacgggagaaa

SEQ ID NO: 86 - DNA, 1880 bp, Poplar sp.
gagaaaaataagcttgactaatttcactatgaccatatatactatgtgtatggagtgagcagtgaggctctcaccaaccacacatgtagcttatccaagagtttgacaaattaattaaagcctgtaagcttgatatctctctatgattttctcattgtcttcacctaccctccctggatgagaaccaccactgtggtttgtggtgaacaagacccggtctaaccacaacaactcctggctactattttcttcttcttttttttacattttcttgaagaatatgtgcactgtggtgttctccactgatgtatcttttttaattgatgcaggctgctggatattatctaccaggaacctcacgatactgggagctagtaaaagataaaaataatagagatatgatatacataatttcatatatttcttgttttaaaaatatataaatttatcttaaaaactgttaccatagagacatgtttattttatttgtgtaaataaatatgtttcttcctatcttttttattacgattgctcataataaagactttattatgagcaatcgtccattaattcaagaggttaatgatcatatcacgtgtaattaatgctgaattgatcatgggaaacacgtaagatgtttcctcctcaaacagcaaaccttaaactagttgctttgaagaaaaaaaaaaaaaaaagggtttggatcataaattaacttgacaggttttttacaactctactcagagcaggttcaaactatcgggcaagcagggtttaattaataaaggtggctctgtatgctctgcttttcttctcgaaagagagaatggtatgggtaaactttcaggatgagaaatatatccttttctttgttgtcttcgtaggttttttttggattcgttgattttttcttcattatggctatatcctatatatcagccagtgacttggccctggctttcacttgttcaaaccctacgttcgatataaatatttttaaatggttaaacagtaataccaaataatcagggcagaaccaggggaggggaggcaagcaggagctgggcgcctgtaaaagattttagacttttttattatttagtgtttaaatatagaataatatattatttttttattttaaatagagggattttctaataataaattatatcttgagttttgtctacaccccaacaaatattattttaataacggtttttttttataaatttagtcatcaagcccactgttcaggccgttttaacacccaattaagtaaatctcagtaggactagccgaaagaagcacatgattacaattaataaattttacttgagttttcttctataatatttatgcctggctttgatccagccgccatgattcttggatttaccatgcactcacgatgaaaagtcaccacttaagtgcatgctacttaccacaacatcccaagtgtcacaatcccacccattgaatcccatgatgatccaacggccacatacacttttcaaccagcacatcggccaacccaccccatccttctctatttaaagcacctaaattttggtgaataaactcaggatttttgggtaacctgaaaattcctacatgcatttagagcctcgcaacttcagttttttttactatacaaccctcatataattttttacgccagaaaattctttgtgctcacacatccgttcttctctctcattttctctttgatcataccaattgatccatcactctttttttgtctctcctccattttggcatagaggatcatcgctttacaggaaaaaatggaattttgtcaagattcacgcaatggcaatggttcactaggatttaacactaatgaccctttgaactggggc

SEQ ID NO: 87 - DNA, 3726 bp, Poplar sp.
cccttagagttttagtttttttttttgcaattgtaattgtaactagatattacaaaagtttaggttatatagcatgcgtttttatgtggtcaagttaaaccagtaaagagatcaaagcaatctagtatgcgtgtgcacacatatatataggattatagtttaagcataaaaaatcctagtacgcactatcacatacaaagcaaaactaattaatgataaaatagtacatgtttaagttgttgacatttattggagaatcgacaattcattttgtcttgtattggaaaattcttggataagtttaaggtacttacttacttaagatcatagaaccaaaaacaagtaataatttgatgatgttaatgataaatcatttgtcctcaagcttttattgctcttcacatgatgtgaacatgataattatgtaattatcctcccatattccaagtactccttcttatttaaatgtattattaaacaaggtttaggaactagagaaatttaaaactcaaaatccctaaataacaagcactagattagggaatgaaaaaagttaaagacatggcaaaaggaatggtaaaataagctaaaaaaaaccacatggaaaaaggttaaagagctacaatttagtgtgatgaacatcttccatttaacccgtatctatactaattttttgaacctacattggtgaaggattaatcatgagaaataaccataattaattctcatcttttgaccttaaataaccctttaaaaaggaataaaattttgatattttttagctttaaaaccatatgtatttcctttgaaaactattcaggaagatgaaaaagattaaatgttcagactctttattcatgggttggatattcataaatggaccaacaaaaaaataattctatatgagtagagaattatttataaaaaactcaaatccaagtccaaaataaattagcaaaaaacataatcaaaccgacacttgaggcctatgcccgagccgagccaagtacgtgcgcgttaaactcaaactattttgctaagacttatttatgactcttcaactttccattatataaactacaagaaaatcttatttttttttctatgtgggatacaaagtattgaactttatttcataaaaacatgttaactaaaggttctttgagattaattttttatttatctataatttattttaattatgttaatattccatgacaatgaactcctattaatgaataatttccaatggaattttaaccctaaaaaaaaaaagaattccactttaaacttgacctaatatatcttttattaaaataaattataatagtttagagattttttatgtgtcttagtgttcaagagataaaaaaagaaggatgaaagttggaggggtaataaaaaaaaacaaaaacaaaaacacgatgaagattgggcaaatgactcaatttattcttgcataattgaacattttatatgtacttacatgtttaattattatatatattttttataatatacatccacataaattattttttaatttttcgatgtgaaataactatatatagcctatattcacatggattatttcttaacttttcaatgtagggtaactatataacactttatatttttacgtttcgatgtgaaataattatactatacttcatgcctcgtattttttttaataacctacatccacttacattgtttcttaatttttcgatatgagataactatatatggctacattaacatgcattattttttaattttttaatatggggtaactatatatagcaatatccatataaattgtttttaaaatttttgatatgaaataaatatgctacacttcacatttcttttttatagtctacattcacgtagattgtttgttaactttccaatgtgagataactatactatactttttacctcatatttgttttttatagttcacatttacatgcattgtttcataatttttctatgtgagatattaaaatttcaaacatattttttaaaaactttccgggtttacttgagtcaacctgtgacccacgactcggctccttgcttggtcaatctccaggccgcgtttaataactatgcttataactagtgtttttattacttaagtttgtggaacacaaagttaaagaacatttgttaacgatctcgttatcaaacacatccttaaatttgtaatacttaagacaccatttattttcttgtttggagctgtgtttgcgtatattttaaaggtatgtttggtttgaaaaattattaaattgatattcttagtattttctataatcttgatatgtttatatataaaataaaaaaataaaaaataaaaagtattttattatattttcaaataataattactttaaaaaattatggtacactacaataacacacaaccaattagttttggcccattgatcttttagaacataaatgtaatttcacaactcctatgctccgtttgtttactcgcaataagatttttatgaggctccgtgaattttaattgtttattaatcaaaataagattggaagcatacacttactaagaaatgtacttacataatttaaatgagtagacagtataatcaaattataaatttcaattcatttctaaacattccaaactacatgattcgattttaatattagcatattaaaataataataaaatatataaaaaataattttaaataaaaacaaatattaaatttttggcgacctttattaagatcgagttccatgttacaaaattcacgatacataaaagtacagaaaacaaaagtgtcacttccctcggccaatagaactgtagaatcaagccttcgcgatcctcgtcacttctctaagaccacatccttgccgttcatatcaagtagagaaaacacaaattaacaatgtttaaaccgtccgataacaaggagagaaagcacaaagatatccaatcttacccgtccgattcctaactccaaatctctataagtaagccttgacttcactagatttcaaactttacaaaaattcgacgcagggagggagcgagagattctcgaagagattcaaagttgcctttttcggagtattctattttctcttgttcctaatttagggtttctgattaagttcttcgatcattagggttacttgttgtttgaaattaaagtctgctttgggggattttgggtattgaatttgtgtgttcttgattcggtgtttgaaattgttggatccttttcgaagtttacggtttatttatcattttcgtttcaattaattaatttttcttgcgttgttatgattgcaattattgatatcaactttcaaaccaatttaggattttttagacttataagttttgatggaactgtttttttatgtcactagttgtgtaatagtttcaaggtcattcatatttcgataacatttgttgaattgtggttatgtttgcttgctgagaaaatgtaaggaaaacacattttcgttcatggcctatgttataagcttgatcaaagatatgaattctgcataagacgtgtggttttgattatgttttcttctgtttctcaaatgttgcccaggaggcctaaagcgaggtggtcaatatctgcatgaagttgtgttaatgaatgttaaatgttgtcttttatttgttatttggatgattgtatctgatgaattggttgtgtatag

SEQ ID NO: 88 - DNA, 3741 bp, Poplar sp.
ctgggaaattattcaatattctttatactatttgttggttcttcacttgtggctgaaatgctatcttacaataataggctttcaatgaagatgcagcaccaccccttttttcaatgttcctttctatgaaacgttaaaacttattagtaattgtttttagtctatgtactgttggattttagctaatctaccaacatatgtaaacggaatgtgtcttcagattcatattctgcagatctgtgctctctgtcttctgccctcttgaagatgagcaatatctacccatttgcctgccccatcttcccaattctgtctccgcgagatctgaagttgtgcagtcagctgtatttcggcttgcaaatcacctgaaggttgcagattgttttcaatttgatgacagataaggaagataaaactataaaaatgcaggtttctggctctcgagttccattaacgttatgtggtaaataactcctggaactcgatcggttggtttaagggcacttcaaaggagtattataatttggtgatagagcttaagctggtggtcaagaatagaatattggctgagcatggttgcttctgctgacatgcgaactcgttaattctttggtcagcatgttgtggtttgctgttctaggtggtacttgatgatttgcagttgtgtatgaatatagctgcttagttgtctaggcgttatcagtgtataatctaattggttttacaccttcttagagttgttttcaagctagtgctaagttttgtacctttgtaaaagaaaatcaggttagtcgaatgggatatatgttttcattttcatttttttttaaaaaaaagttatagtggcaacggattcatacattattgttgaagctgtgggagaggcatatatgtaaatgggtcctgaaattgaaatttctggatcctttcagctgtacaatttacaaatttgactcggctgcttttgtgttctttggtgttgtagctccagttgcgcgcttcatgtgatgattagcgtctttatttttttactttttttttcatattatttaaatatgaaaaaaattataatcaaaagttatcttggataaaaaaattatatctatttgaaaaaacatagaagcaagaaagaaaaagaaaaagatctttctcaacgcaagaaaggattggttttgaaggaaggaattaattaattattttttgttaattcacttccatattttatatgataattctatcttttaaataaatctcacttattgtaattcattcttgtattgttgtaattttaagtgagtggaagcatacacgaatctaaatctaaagacaactcatttatatgagttgaatttatatttaaaattacaattatgagtctactctttatgattttcacttattattcaaaagatttgacttagccattagctttgatacataaaaccacataacatatatatatatatatatatataaaagatgtttgggccaaggcccaagaaatcttgattgtcctgtccaggtccagggggaaggcctccaagttgccctggcaacgaccaataaatctcccttttctctctatataggtttgcttatctcgttaacataaaaacactaggagaaaaagttacaggccgtgatctcattctctgcgcatgatgcgctattacaagggctgaaacatagcggacccatttatgtcaaaattggggaactacgagcgagaagggcattagtggacaccggctcttctatcaatatcagcctttatcttgcataagttgggaatagaaaggtgccgatctcaaccttcctcatcaacctccagcaacttgctcaacatgtgagccataacctttgctaacgaccatgttcttcatcagaatcccattccagtattccaaaaccaaaaaagccatgcagggacaaggacaagaatgttgcacactagatagaagattctacacagttttgctgacttgtgacataaatttattgctcgctttagcaccgatatgccaaaaaaaaaaacactccatgatactgatttttttttttattattttcatcctttatattgatttaatttgaaatttgaatttttttttattttttataagattattctattctcaaaattcatattataggttaacccaaattaacttaatactattttgtaaattccttttcaaaatcaactatttttttaattccaatcatttaatattttgttacttatcatttaattctttcatgttaacttgtaagattgtaaaaaacttttgataaaattgacaggaatttttttaaaatattgtcaggagttctttttatgcatgctttcgttatcattttttatttaattgatttattgtggttgttttttattttattatataattaaataaagcttgcttattgaactagtttatattataatttgagtcacgattttttttaattttttttaaaatatattaatccggcttttgtataccgagggccagaagtctaataataacaacttattcaaatgacaaggaaagagaattaaatattaattttttaattagagctttatcaatatatagtttttttttataaataaatatcccttgtgtggataacacatagcataaagtacccgattttgagaaattacacataagaaagtccttaattgcaatttcctaaatctgaatggacatctgacaaaagacatgatacatagtaccaaccacacattgaacttcctagccacaaggaaagtacgggcttcgtccttcagccaataagattcgagaattaaccctcaacgatccgcgtcattactctaaaaccacatcctagccggtcacatcaagtagagaaaacacaacttaacattgtttgaaccgttcgattataaagagagaaagcacaaagatacccaatcgtacccatccgattcctcctctaaatctctataaatataactcgactgcttctttaatcaatctttacaaaaatttcagagttttagagagaggtttcttgaagagattccaaggtgcgtttttttgacttccttcttctgctgttcttgattatggtttctaattaaatttcttgattggtcataagggcttagtggtgtttgtaattgaaaactgttttgagggattttgggatttttagggtttgaatttgttggttcctgaatctgtttctgaaattgatgggtcttgttcgaaatttagggtttctttgtcagtttagtttcaattaattgttattctataattgatttgatataattacgattattgattttaacttttcggtagttggtttgagattcagggctgtattggcattttagttctaatgatgtgtttctttgcgtctttagttgttaagatctgttgaacagcgttatgtttggttgctgagaaaatgctaggaaagccaatttagttcttgaccaaacggataaagccctttacaagactgtgtttagatcttgaattgttttcttgaagaccaaaagtgaggcctgaaggtgcatgaagttgtgttaatgaatgttaacatgtttgatcaaacagataagcgctttagtcttaagattttcaactgttttcttggagaccaaaagtgagacttgtgttaatgaatattaaaatgttttatctattttggccttcctgattgaatgattgtttctgattatttgtttcgtgtgtgtgtgtatag

SEQ ID NO: 89 - DNA, 3086 bp, Poplar sp.
atgaggtatggtaactatgtcatggaatgtttttcatactccaaaactaaaatgacattggcgccgtgagatataatttcatgttgtctagaataagaaataaatcaaattacatgatacaaggaagttaacaatcccttcacatcctttatatataccatatatatatatattagaaaagcaccaaaaccacatgcactaactacccttgcatcctcatggcacagccattctatttaaaaagaaaatactaatccattttcatcatctcagaagtaggtagcacataccacagaatttcagcaactgaaaactaataattaaggtgatatttccatttttcttcttgattaatgcatgcatctgatcatttgatatatctttttccctagactatgctagctatatatttaacttgcttgcttaatcaggcatgtatttttgcagaccatgcaggtgacgatttcttttaatgataaagagcttgaagtggaggttgaagagaatgcgaccgttttgggcctcaagcatcgactccgtgataagcttagcctccagccattggcacaagagctagagtttgaaggatttatactccagaatcatggaaaaacattgcgaagttaccacattggaaataatgctaaaatcgttcttcgagagttatttggtatttcaatccatgtggtaaagcaagataaagatggaaaacccgacccacaatttccaatatcagtccataaggaaaataccattggattcttgaaggagatgctttctataaagtatggcgtggagtttacacatatgaaactagggctctccagcatgtggaataataatcttcatgatagtactaaaattggggcttataatcttcgtgatacaagtatattatacgcttttgaaatgtaattaattaatcacctgttgggtggtgaatttatctcttgatcataaaagaaaaaatatttaataaatagcatttttaaaatgtgtaagggttatattgaaataaaataagattttcactctattattttggaaaaatgatatattgttctagcataaacttgaaagtaatacatcatttgtttttgtgttcgaaattgatattttaaaaatgtgttttgtttgaaaagagcagcaaattaatatttttttagtatttttttttatgattttaatatgctaattaaaaaaataaaataaaaatctaacaaaaaatcattttgatatatttttaagttaaaaatattttttaaaagtaccatgcatattataggaaattactctgaaacttccaagacttacacatatttacactttttttcctgtaattttacaaattatactttacatagcatgtcaatgtaagatttaaattttgatgaaaagaagaaaataccctcctatattatcaatccatctttctcttcctctcctcccatcccaatctaaccaaaactcaaaaattacacagtacatactaagattatatattgtttaatgttagggccggccggattgtttattgtcgggatcatttgtttaactagaagatagatgggtgagggtgtgatgcatggtggttggacatttaaatttctttgtgactatctacttaatcggccagccattagactatgtattaaatccttgtttttggattttatgttattgttttgtgatttgcctctattgaattccagtttagagacatgcttaaagacctctctatttacgacaaaggatcataaatagaagagagtgttgtgctgtgtgtttgttaggttcatgtggttggattttggtgaggaggaaagggtaagggtggtggcttctttttttttttttaattcgatgatgatgaagttataatatttaatttataaacactctttagtcatataattttttaaaacttcattgttgactgatatttcacatactcagatcaatatgtaaactattataatttttattattattattgttaacgtgagtgtctgagtcagcttgcacgcacttcgactaattccacgggccctgaagttaacgaccatgtaactctctagtggctatcatattagcaaccacagggctcgaatctgagactacatgggaagcaaaccttttagtttcaagtttctatcactgatcacctactagttgtaactagtggtatgtaaaatgtaatttctgaacctacaaaaggaagatgtaatcgcttataaattctgagagagtaatttccatgtttatctctataaaactgtcatatttgcaacatcatcgctttatgataactttcaattcttcacgttaaattttatgatggaggcaaatggattattgaagcttatttttgttccttttaattttactatgtccaagcccacgaagaaaattcatctttctttcttttttgttagtatttaaaaaatatatatatttttaaatgtaccagatgtatttttaaaataattaaaaaaatattttttttcttttaatatttccattgctcccactttcattccgatttttcccaagtgttgctaggccctagcacgaagtatcaagaaaaggcccaattacaactaagtaacaaaacaattgcaagcccaactaagcccaacccattaaataacttccagaaagttccaaaaaaacgcctatatctacccatcaccgtcactccttaactccgttaaccatcccacaacctgtacccccacgtccccatctcgcaaacgagaccaaatacagaacagccacctaacaccgtaaaacaaaatccatatccccgtcaaacaaaatccatatccttgagcaggcaactatcctaaccttaccgtgtcaactaagcaaccacaaccatacgacacgtaaagtgcacacaggtcagagtctcattggttctccacgtcacagcctctcctttgccgtaacagactcggcttcctctctataaaagtcgttccccttccccttcctctcacacaaacgttaccatacatttcttttcctcaagttcttaaagctcactcttttctgtccgtccgatcaaatctagaaaaaaaaag

SEQ ID NO: 90 - DNA, 3239 bp, Poplar sp.
tcggtacttcaaattaaatgccctcacctttttatgtcataactatgtcaataaaaggacattagaaatacccatacctagtggatgactcatatgataatatttttttcaatcaatattgaaccactagttattagaattgttacctcaaatgtttgccattaaattatgtaatacatatcttttccattctatacttatttttatacaagttagcatgatttatgactatataaacatctatgaaccactgagtaaaaaaaatgtccttatttccagatttatcaatgcatattgttatcatcttcttaattatatttttgcaaacatatacatcacataatttataagacttcatttcttttacatttatgttaactcaagcatcagatggtcttttaaacccaacatggaaattgtttattaggtactcatgattttcaagtctagtaatttaaattcaatagttcaacgcatttgtcagccttgaaatgtgcttaatcttctgggaattttcctaaaccttatcattggcattatatgtgggtaatttgaacaaaaataatttcattttcctttattttaacatatcgttcatttctttccatgactagcaactcaaaaactttgggacatgagatggtcatataccttcccaccacaagtacttcaccagcaaataaaaagcttatagagtctatttttgtccatacaaaagaaattaaaggccttacctctttcatggtagatggcttctccatttattggacaactaacaccttctaatatgtgaaaaaaactttagcttaatgagggaataggccataatatgatataaaaaagtaggagagagcatcatccatcccacaaccctcataaaaagccattcttaacatcataaagagagttcctcaagtggatgctccaaaaatggcaaaagagagtcaaaggataaattaatatatagtcgcaattataggagcaaccaccgccatcatcaccactcttcattagtgctttcctcaggtagcagacaagaaaaaagtctagagcaaagtcaagtttgtggtgatacgagccttatacatattagtctatatccctaccaagtgagaggttctcaattagccaaacatgtattagacactcgtctctcgagatatttttatctctataaaaataaacctaaacagccatgatgggctcataaaccgatgaaaagtgtactaaatatgaataacaatctatatttgttacataggattctgatgcgttatgcatgattctccctgccatttttcaagggccagcctgcatatggtatcttaatttggatcttatatccatcctcaactgtgagaatctttgtgcaaagctcattgcctaacataagtatcctaaaagacgagtgtagaaagatagtctcacccacgctttcagaagtgaaaggagtcctataaatatggttggtctttaaatagtttagggctattgagatgaatccaaatgggttagtttataattgccatgtctttcctagacttttgaccacgcttcaaaaaataacctagatagaggtttatactaccatcaaggataatgacttcatacaatatcccctcctacgaagggtgatctttatacccataaccaaaaaaatattaataatatagagaaatgttataaaataaaaaagtttattaaccagagctatcttcaataattcatgaaaaaagatgcctagcctaaaatagaggaagaaagagactgacatgtatcacaaggcattattcaagatcaatttaatatgagaattgttctgcattgaaaaaggaaatatagaggttcatcagcaaaggttatcttcaataatttaaaaaaaagttgcccaactttaatggaatgatgaaaaggttggcgcacatcatgatgaattgtcctaaatcaatgtgatattagatgaattgtcagtaagaaaagactccatgaagagagaagagcttatgagaagtaggttatcgttatcgcttgtaccttgaacccatgatacaaatcaactatttttactataaagaatggagaaggggtaacttttccacataaagatgcattagtgatcagtatcatcctcttccaccattcttccaaagaaagtgatgagtaagatgaataacaaactttcaacataaaaaagaaataaatatttaaaagtatggtataagagaaaatagaaataaagaataatataaaagcttgcaaattgattctacatcaatatttcaaattaatgatcaaacaaaattatttaaattggttcgaaaattgtaaaaaaaaaaatattaatagaatttttatctatagattagaggtgtagataaaactataatatttggattatctttttaaaagattttgatttttaagtgaaataataaaaatttgaatatccaattgatgtttttatcaagattttctactatcacgatggattgttctttcaaatacagtcaagatttaattaatttgattattttcatcaaatcttataattttattctttgctgtatcttaataataaatagagttttaccattatctttataatttatttctcctttatccatcatcattgatcacaaataagtattcattatttactttttttttttataaaaaatatcatcatcattaataatttaatctttaattatttataaattacaactttaacaactcatattttctttcatttcatcgcaaaaccgtattctaatcttaaatttgatagataaatcagtctagtccatccacattgaaaaataaaaagaaagaaaaaaaaatagtgtaatttgataaaattgcaaggcaaaataaaaaaaaagaaataagtgcaaaataaggttaaagtttaggaggtgttttgtaaaaaatgtgttgagaatgattaaatacggaaagaagtctcttcttatattggacgcgcttagtaagacctcttttgcgaaacacgcaagaacaagccccaccgcaccccaccccaccccaccccaccccaccaataaaaaaggaaaagaaaaaagaagccaaaccctcctcctcctcctcctcctcctcctctatatctctctcatggatctttgttctttgatagatttactcacataattataatcgtgagatctctctctctagaaaggtaaaggaagaggaaaatagaaacaacaagaagaaacagaacg

SEQ ID NO: 91 - DNA, 3727 bp, Poplar sp.
gtaatgtttataagtagtttctattgaataattcattcattcatatgttaaaaaattgtatttgatatatatatttctttgattttttaggaatattttaattttgaaatcgttgttcaattgaagctatttgatattcttccttattgatatcttggataacatcttgatttttaaaggaatcaagtgaaaactttttaaaaaattactcttcaataaaaattcttcaacttggagcattaatacatttaaaatagattataattgaaaaaaaattatattaaaaatctcttagttcacatgtatttacaaatccaaaacacacaatctcacatcaaaaagttataagattttgttgtagcttatataatgaaaaattaaagatttaaaatttaattcatacaccaaaatttttagagagaatatgcgcaacgctaagtgataagttgtgggctttagtcacaaagacttgctaggcttggcgccgaagtctaggctggataaaataatttgttagtctaaaagaattattatgtgtccacccatgattaaattgtgtaaccattctttacctaaacaatttatttttaatgggaaaacatcttattttaaggcaaaatttttttgtcaaaatctttgtttgtggtgggtaattcaagcaatacaatgagaattaattataataattaccaaaattattttaacatcaattttagtttcaaaaatcattgtaaaaaggggtaaaggggaagtgttctgtacaccatgcagtagctcttacactcttctttgttattttccaatcttttctactcaatttttcttcaatcattctagagttcagatttagatttttttaaagaaattttcagcctatttttctaagtttgtagaccttaattaatagtaaaactaattaagataatggtgttggatttttaagaggttaaatgcattcaatctatttacaccaagtgatgaataataagaattcaatgacaaatatactttttacatctttcatatcatctaaatgcttcaaaaagtcagtatatacataacattctgtttgagatattacatatacaattctttaagaacatcaaccaccaatttgtaatttatctttaaattattttatacttactcttcaaaactaacaaacttagggttccttactcttcatctgtatgcaaaattcatctagttaaaccaaacatgttaaaagatttaaaacaaattcctagtcatttaaatctatcgcgcacacgaggaccccgtttatttactggaaagtagtttctttttggaaagtgaattccgggaaagtgaattatttttcgatgtttggtagtgtaataggaaataagttggaaaacatcttccagtgtttggttatgtcatggaaaatgagctggaaaataacttattaattttttattttttttcaaatttattaaaataatgaggaacaaatcttataaattaaaaagttgaatgtgaatgaaattgaaaaaaaatataatttcataaattatctcaaataaaataaataataatcaaaataatagagatcaaatctaacaaataaaaaaattaaaagatgaagaaattaaaataataataattaccatttcataaattatttcaaataaaataagtaacaatcaaaagaatgaggaccaaatttgatagataaaaaatttcaattaaaaaatgataaaggaaaagcaaataacaattataaaaatgaggaccaaagttaatataaaaatcaaattctaagggatgaaattaaaagaaatatattcaaaacaatatatatatatatatatatatatatatatatatatatatatatatcaattaaaaatttgaggaccaaatttgatataatcaacaaataatatgatatttttaaaattttcacaactttcgaaaaatatttttcgcttaaaataaaaggaaaacactttcctagaaaccaagtcgaatttttctttaactaaaaaatgttttccgtcgatcagctaaacacagaaaagtttgaaaaataattttcaaaaaaacatttttttgtcaaacatacaatgtctaggtttgcaaatattgaaaaaagtcaaatctcacgtctttaagcttttttttttaatataaaaaaattattattttttatgattttataatttttttttgttttttattttttttcatcataaatggatggtgacggagttgtccaccaaatccagaccccttttgcaagttgtgtgatccatattataggcgtaagcagacggctacccaccgtttactcgttcctttcccttccaactccgcaacactccaaataagaaagatatcaactaatcattcaaggtgcgtggactacactgcctcaattacttaattttggttttttatatgcacacacttttaacgtggaaaatattctattttggctttctttttatatttttattttgtatttttatttatttatttatataaaagatatttaaaataaccttgctaacttgtgtttaaattaaattattctatctaaatatttaaatcaaacctcaaaattatacaaattaatatatatttgtaattttatttagtttgatgactggaaatcaactagtaataagcttgtagaaagaaaaaaatttaaatttaacagtagataaaaacaaaataagattctagccgtaataaattttttaaataaaaaattattttcaaattaaaaattaactcattattttttcatagcaatataacgacgtaaatccaacagaaaatttttttttttttccttacaaacaaacaggaaaattcaaatacggaaataccgcataacacacgcgtactcgaagagcgtagtccttttctctcactctcagtttcctagcaatatccgcccccactagacgccactgataaaaggaaaaacaaccaagaagtcttccggaaggatcatcctaagacgtggcgtttcataattagacgctgcaaccgggtattcccgtaatttcaccatcaaatttctatgatatattgagacgctccagctctcttctcctcacagttgtgattatttcttctctatcaaaatctttaaacagctctcattcaaggtatgcctctcgtgtccgattgtctagttttttcttaaatttatttttaaataaataattgttatacgatctgttagtgttttatggatcagtccttaataatcgtttattgatgacagtaatctgtttttttttttatctggatattacgacgttgttattgattctattgtttagatctcgattgatgggggtaatcgaggaccctttccatttttttttcaaattttgatcaattgatttattctgttaagatctgttagtgctttacggataacatagatctgcctgatgttcagatttatttatctcgatcttagggctctattattaactctgtttagatctcgattggtcggtgttttcaagggcctcttaagatttgattaattaattaattaattaatatggatcatgtttctattcgtttaattttgatgctattttgattaaaagaaaaggttatcgtttttttttttaaatgatcaattgaatttgtttgctattgttaatgatctgaaggattgttatatgttgagatctgaatctagtttgtctctgattttacttttttggggtgtcag

SEQ ID NO: 92 - DNA, 3639 bp, Poplar sp.
aaaaatgtggccatatggctggtaaggtgcttgttgctattagtgagcacattaataggcttgtagcggcaaggctgcaatttgatgtcatgggggtggagacggtgctggtagctaggactgatgcagaagcagcaagtttgatccaaagcaatgtggacgctagagatcaccagttcattttgggtgcgactaatccaaatcttagagggaaaaatttggccaatcttttggcagaagcaatggctgctggtaaaactggagctgaacttcaagccattgaggacaactggcttgcaatggcacaacttaagacattctctgagtgcgttatggacacaatcaagagtatgaatattggagagtacgagaagaggaagagattgaatgaatggacgaaccattctagctatgacaagtgcttgtccattgaacaaggccgagagattgcagaaagattgggtcttaacaatcttttctgggactgggacttgcctcggaccagagaagggttctataggtttagagggtctgtggatgcggctattgttcgtggcagggcttttgctcctcacgctgatcttatttggatggagactgctggcccagatttggctgagtgcaccaagtttgcagaaggtctgaaatcaatgcaccctgagatcatgttggcctataatctttccccgtctttcaattgggatgcatccggcatgaccgatgaacaaatgagggatttcattcctaggattgctaagttggggttttgctggcagttcataacattggcaggtttccatgctgatgcgctggtcaccgacacttttgcaagagattatgcaaagaggggaatgctggcctacgtagagaggatccagagggaggaaaggaaaaatggagttgacacccttgcgcatcagaaatggtctggtgcaaattactacgatcggtatctgaagactgtccaaggaggcatttcttccactgctgccatgggaaaaggcaagtcacacatattttttgtacactaaagaaagaattgaagtagcaaaagcttgacaatcttgaatcctaattctgttttgcaggagtgactgaggagcaattcaaagagacatggaacaggccaggagctctcgaaatgggtggtgcaggatctgaagcggttgctaagtcaaggatgtaagaccagagctgcttttgagtatggtataaggatcacttagaacatcaaccagttcctatattgtggaactggaagtgaataatttctggcaattacgccattcttgtcttcttctttttaccagctacattgtgctcgtcatcacttagtctagctctgtctaaagccattgtcagaacaggaacttgtttatggttactgtaattcagtttccttcatatgtttgcagtactatatgatgtttgtgctctacagtacttgcatttcttagcagcatacctttatcttagaatttcatattgaaacctactttaaatccaaaaagaaaagtatataattcaatttcacctcagagactctcacaactttgaacatttttttattggaaagtttccatgacaataaatatttcaataaatgtttgaagaaaatatattgattgtcttaattaatataaatccttggaacttgacattatatgtgcgtgtggaatatttctctccatacataagaaagcaataacaaaattgataatgatgaagatagttcaattagtcagcttttaagtttgctttctagaattgctttttagaaatcaccagtttgagtctcaaaaatctcagggccattagagccttacatgatcgttaacttcagagcccatgggattagtcgaggtgcacgcaagctgacccgaacatccacgttgataaaaaaaaatttgatagtgaagaaaacaaaaaacaaaaagagtaaactctttgttttcaagaagaagatttgaattgttttgatgtgttgatgtcaaaaattatttttaaaaaaataaaaaaaatattatttgatatattttcgagtaaaataacattaaaaaacaattattaatacactcacaagtgtgtgtctatatatatatatatatatatatatatatatatatatataaaggtttatgcaatgctatcctagaccacaacacatcaggaaggacccactccattttcttgaagataagtattcttcttctttaagaaaataaagaaagaaagataaggatgccaatcatcaatgacgtctatgtccacgaaattggcttctcaccaaccgctttttcctcatgtcacggatgacgtcggactaaattcctaatatattagtgctaatatttatttttagaataaagtccttccttcccttaaaatcaaagtttatattcttcttaaaaagcgacaaattgatgcttataaaaattaataatcaactatattacatcattattctaaaaaattgtaagaattgttgtaagtttattgctatttttttcttttttttttaaaataaagatattttcaaattaaattgagatttaattttattttttcataattttaaggatatgtttttatattaatttgatgcgtttaaaaaattaaataaatgacaatgttcaaatgaattgaatttttactattttaattactttaataataatactttggtttgttcatgtgcacattatacgggttttctattttttaaatatattaaaataattttaatttatatttttttaatattaacttattaaaatcataagaaaatattaatataatatttaaaatattaccaatttccacataaattaggcaccactagtttttttccttaaaaagattctctgtgtcggtaggataagatgagcgcgttcaaacacacacgccagaaaagagtgcttcacctctctttttctccagggtattctcgtaacttcctctataatttctactataaagtagaacctcgagccccgagttcctcacaattccgataatagcaatcagccaatacaaaaaaatccctaaaaaatctctttcaattctcaataactcaatgtaagtttcgttcctaaatttctcttgaatattggttgactgcttaatctttggtgtgattgattgattgaattgtgttttcgatttgattagaaatcgttttctttttgttgattttgatcgattttcaaaggatctgtcttttctttagaatttatgtaaatatttgggatttgtttctttatggacatgatgattgctttcaatttggttaaaaacaagatgacagataattttgtaggttatatattgttccttgattgaaaaaaatttaattattatttggaaggcatgattttttaatggttcttatgattttgtgggttgggcgtaggcttccgttttgattgatttctattttgagggtagctgaattgattgatatgtgaaagattttgttaaagagtctgaatgtgtgtggtggatgtgtttatctttttgataatattataggatccattgacgcatgatgaatttgtggggctatgaaaaatagtttttttttttttcctgtaattaaagttggctgatcttgtctttgtgtttgttatatgtgaccag

SEQ ID NO: 93 - DNA, 3182 bp, Poplar sp.
ctgtggctctgactaaagtttcttgaatgtaaaataataatttccagatcatgagtcattaaactcagtttaatagattaattttaaaatctcttagcatgttttttttctaatttagattttaaactaaatcatggatgtcctgacataactcgatcaacttgaaaaattaaaaaacaactttaatgattaataaaaatatgatttagtacaatgtttttatctaaatgttttagtatatgttataattatttttaaaacatggtccgaccctatatattaacttaaaaaacttgagattaattcggatggttagaataaggtttgggaagaatccaagttcaccaaggaatatatagaaaaccataaatcaatgtagctagtcataattgattagaagagttagaataagtaatcgatcaggaaaaaaaaacaattaaccatgtatataaaatttcacataatcgaacaatgtggtaagtcctatttatcataaaagttattgatggattgaactgataagtattacaaatgatatgtcgatatatatatatatataaaactaaaattcaagaatgttgagtctatctgcaaagttagattcaagagttttaggtctagctgtaatgtcagacctaaaaataatatttataatattaattataataccaatagtaatatttataatacaaataataatatttttaataataataataataataataataataaacttgtcttactcaagtttaagtgagtctggctgcaatgccgtacccaaaaaccttggatgtgggtttggctataagattgtatcatgaaagtgtgataactaaatagaaaaaaatattgcaaaaataaaattaaacaaaaaaaatcaactgaaaagaaaagaaaaggcaaaacactattcaaatgaatagtgatttgggaggaagagtaaaataaaatccccttatgagatcatgataatctaatgaaaaataaacaaaacaaatcataaagtttaattctcaatcaaatcgatattaaaagataaaattagaaggaaaaaaaaattaaaaaaaaaatctgagtcaactgccttaacctaccagaccaggttaacccatcaaatctgggatctgtgtcatgaaaatatgataactaaatagaaaaaaaataatattaaaaaactaaattaaaaaaaaaataattaaaaaatattgtctttcattatggatttgcaccgtaaaatctacagtgaaggactaattctttttagttatagttaattaggtaaacttcatatgtgatgtatataaatagtataaaattaggattaaatgtttacatgaaactcaaaatttataacaatataaataattaatctaattactgggaataataatcagcccatatacacaatcttttttatgcaatttatcttttttttcctttattatgtttctttactttgtttattttattttatcttttacttcttttttccgtaacatataatgggacaatctcattttatttgtgatagtttttaaatccggctcggcaggttaacttgaaactcaaccaatccattctctaacttaagtcggttataaaaaaaaaaaaaaatcaatttcaacttggaggtgaccatgcaggtcaacatgcaacatgattgatctattcaaaatctggtttgattttaatttttttttatgcaaaacaactctgttttagtttttttttttaaaaaaaacaatgttgttttgattgacatgtgttaacttgttcaatatgtggcccgagccttgggttgattcatgagccgagtcaattttaattgcaacactactatttgtttttgcttgtactcgcaattaagtttctaattgtagttttttctcattgaaaaatgaagtagcataattgatccatataattatcttattgatcaatggtttgacctagttgggtttcaatgatgcagtcaaacttgaataggttaacataaaaaaaattctttttaaaaaaaatacaaattgttatcattttaaaaagacaattttactctttttttaatttttaatccttgatttaagaaaaataagagaaagttattgaattctgatggcaaagagataaaatgatctttaacatcaattttaaccaccaaaaaagtcaatttaggtattaacaagtttcattcggtgaaaaaagtttcatttatgtgttttttcgccttaattttttttttattttaggttgattttaggtttttatatggttgttttaggctatgaatgagtttatcaagatgtttagagggtgtcatgggtgttgttcaaaataggttgaaaaatgaatttttagataaaaaatacttaggacccgatgaaaatttttatttaattaaattaaaagtcattttccctttaatatttagaaaagaggggtggatgatgcgtcttttgcccatgttattggaaaaaaaaactccgctcatgagctagacctctttcatgggcttagcgggttaggtttttttatagccagacatgtaagtaggcccacataccaatcatgttttttttttttaatttaaaataattccaaccatttaaaaaattaaaaaaatatacatcatatcaacatttctttgtttttaaaggtcttttttatttgatttgaagaaaaaaaactcgttttgttataaaacttgaaaaaaattaagactattttttttagtttcacacactattttttttgttattttaaattgttgttttatagtaaaaaaaagtctcagctctcaattaatctatagttaaataaaaaataattttaaaaataaaaaaattattaaatctaaaaaatgcacaacgtaaattgcgggtttatgaagctaatcttagctaacttagttttttttttttaattaaatgtttttttttaattttattatttaatttccttttgcatttattataaacaaaaagcgttgaaatagcctacaacgaataaaactctggcccacggggacaactatcctgattcctgcgtgctcatacttatccccaaaaatcgcagaccttgtttcgctttgtctcgactctcgatcgtatagtagtgtttttctttttccgttttagagaaaatacaagtttagtaacacagaagagaagaagaagaagacg

SEQ ID NO: 94 - DNA, 4014 bp, Poplar sp.
ttttcggatgttgctactagtatgctggttaaaagcgatgcccttcaactgcttgtacaatgattagcatcatcaaatagcttgcaattgctcactccggtacccttcaatttgagtttttacaaagcttttgttgattactgctgatatttatttatttattggtatttgggtttattatataaagcttaaattgtgctctggatgttatcctatacagtttgttgtggtcgtccaaaatatttattttgtaactttgaatataatgtcatgaagctgtgcattataatgtgaagaaaatcttgtgaagttgtacatttacttttgccatgtagttactcttcagaaagactagaggaagttaaaaaacaaaaaagagctcatcaaaaactaaaccaaatctaggtcctactattttgtcgtttaccatggggaaattcaatgtttatgtttatgccagacagttgatttggaactttacaaatttgcatttccttgatatttccataatttaatggaataaaaagtaaccatgtcttatgtgtttatgttccttaaatcagtacaataacgctttgctaaatggatatgggatgcttgcaaacatattatttccttatctttggattatttgacaagtaatttggtaaacccccaatctaaaaccggtaaatcagtgttagaaacggtaaattttcgattgagaaatgataaattagacagaaaagttttgtgaatcagaatgaacattcctagatgattaatttaaatgtcggatgagataaaaaaattaatcggtatgtgaaatattaaatagcaataaatcatgtaagttttttgatcgggtaaaataatgatttgaaagaggaaatcttgtaaattgtgaatggcttctcccataaaccattcatggtcgaccactttgtttaagaacactagataaaagtgagccaggaatttgaactaataattgaagatttcttaaagttttggagagcataaagtgatgggtttgggggaaaaaattagaggaagaagaaaacttgtttttaacatctttttccttcaaacttcttgtgtttaagaggtgagaaactttaattcaagcttggtttgagtttatcttgtgagtgaaatgatacattttagttaaaatatgcatgatggaaatttgaaattgattgaatgattgtttaaattgatgaaattgtgtttgaaaagatggtagaagaaaaattcatctcccaccataagatgaatttctgtcagggtgggggggatcaaggggagttgggaattcgatgaaattgttatgaagattgcatagaattgtggtggtataggtaattaatagataaacaagatgtcaacattattaattaaaaagggaaggacccatcatttgtctatcatggaaattgaacaagtcttgtttatatggaggagttgtaattgtcaaaattgatgaagaatttatgtttgaatgtatgaagtaaaacatttaaaaagttgatgatagattaattgtacaaggaaatccacccttatcgtagacaaagatctcgaccaactctatttaaagggtttaaaattgttggtttagttgacttgaaacattatgtaaagctgtgatgatgttagcataaatatagctgacttgaatggggaaaatttcataaaaaaatatgtggttatgcatcaagttaataactgtaatctttttattgattcgctttcagctgaagtttgcactaataaataatagaatttaaaatatattttttcatgaaaattatagttaaaaatgttaaatttcaaatgggatggaccacgtttaatttggaaaactgaagaaatgtaatgctggattttttgctgaatagttttatcaattaacttgtcgctaaaatttaaaccggtaaatgatagaatttaaaatatatatatatttttttataaaagttgtagttaaaaatgttaaatttcaaatggcactcccctcgtttaatttgaaattttagaattttggatataaatttaaaaaatatatatatatattaaaatgacttgtagcataacgaggaaaataatctagttacccacttaaaaaaatcagatttgccgtagtgttgttaaagctacaggtttggcgttctatcatctatcttcccatagtgcaaagaaatattcccacaagtgttgtcttgaatcattactgcgtgcgtagatgtttataacatcgaatcgtgagcaggattagctgttgaaagccattctagcaagcgatgagtctagctgagttctatttggcatcgcagtgaattatacttttaaaattttttaattttaaattaattttttatatatttttagattattttgatgttgttatataataaataaataatattttaaaaaataacatttacaatactcttaaatatgcctaacaaatcacaaaccctacagcaatcagaacaaaagctatgaattttgatccaaagcacaaatcggaagacatggctagaatggacagacaagcaaatcaaatactttgatgtgaatcgtagaagctatctgctgggatgactcaagaagatgaaagctaaaattaagcgctagcaccatcagaattgcattaattagggatgcagttaccatgattatcattaatgtagggccaaattgggatttgcgggaagattacgtgtgagtgaatgaaggagggtaaaaaaggaacttcacagatgaaaagggcaacaaaaacataatgaaaccgacatgacctaaaaacacaagcgcattctattactggctgctacgtggtatcttggaccattagtttaaaaacaatccaacggccgatagagaaactttattctattactggctgctacgtggttatcttggaccattagtttaaaaacaatccaacggccgatagagaaaccctaatctaagaccaaatggcttagtgagtgtcactatttaaacaagcataagcggccattctcgatctctttcgtttgctctctgtaactgcgagagagctccttattttttagattccctaaacttcctttcttcaaggttagatctcgtctctctctccccctttagtattatgttatgtttacttgtctgatctgatgcgattctcttttcttttatagcttttagcttttataattttgatggcatctgttataagcttttcttcttatttgtttatatgctactgatcgtgtttcatttcagatctaatgactcagtttttgttgattttgattgaaatcagataagaaaaataattcagactctgaattagtttttcttttcttaaattgtttactgttctgctatgaatataatcgggttttttctatcctgaaaatcagttgcttttagtgtttttatttaaagatcttaatttgaaactatctttttttattaatttgtgttttcttttttcccatcggaaacaaggaagaagcaaactgaaccttgataacatttggtcatgtttgttttgatgaaagtgcctgaatctgatgggaaaatgttttatttgactctgtagtgactgtactttaatggtaaattccatgccttagttgcgtggagacctgggctcgaatcccagcagtcacacctctgaaattattttttattaactaataagcggatctaggcttattgttgtatcaaaggtttgctggtttattcagacacatgtataagctgtgattgttttgcgggtggttttaacttgttatatacgaatgactatttggcttctgtctttggttcatgaaatgctatttttaagaacgtgtcatatgtatgtctttactgttgttgaaattatggtcacttgaaatttaagtataagactggttaattagtattattggaaatgttacttttgtatgtttttctgtccattcaatatgtttgtgtatttattaagtcttttttattttatcaattccagtttctctcccaaagttcatc

SEQ ID NO: 95 - DNA, 3000 bp, Poplar sp.
actttgaggggagaactagagcacaattaaatagcttttaaatttacaaatgtaacgtcaaggtggatttttttttgttgttgtctgtttgaaaagaaatattatttactgtatataggttgattgatgatttatttgatttgatttgaagcaagtttgatgatttgatgtagtttttttttaaaataaaatgatattaaaataaaaaattttattttttacattaatatattcttaaaaaatcaatttaatattttttttttcaaatagaaaaacagtttaaatagtattttaaaaaataaattaaattacaaaagctaccttgaatatttccttatgattctcggacatgggatgtcaggaatccagtatttgttcccttaagcgcaagcagtatcggattctagaagtggttgactttcatgcttcataacagcaaaacactttatcttgtataaaactttttaactctaatttgaggatgaaaatacaaagataataaaaatatatatggtagaaaaaatatagataaaaatataaaaataaatatatttttaaaataaatttatattctttagagatataataagaacatatctcaagataaaatatattttatttttaaaattttattgtaaaaaactctcaattctagatttgtccaaccaggacatgcaatgataaaaataattatcatcatagttttaaaatccgacttgtgagtcgatctggagcaaagtccgagtcactagtagaggttcgggtcacgagctaggttgacccgagtcaacataaaaataaaagtgattattattatagttttaaaactcaatttgaaggtctactcgggataaggcccaggtcatgagcaaggttggttgttgacccaggtcaacgtcgggatgaaaatgactgttatcacaatttttaaactcgaattagaggtcgacccgaagtaaggctcatgtcacatgttaagagggcaaacccaagttgacccgagtcaacataaaatgaaagtagctattattgtaacttaaaaacttgatttgggggtcaacctggagcaaaaaccgaatcagaattaggagggtcaacccgtgttgacttgagtcaatataaagataagaattgttattaccatagttttaaaactcgacttagaagtcaatcgggtcacaggcagggagggtcaacacaggttaacatgagtcgatgtatatataaaagtgattattttatttttaaaacccgacacaaagttgacttgggacaaggtttaggtcacgggcgggagggtcaactcgactgatccatttttttttttaaaaaaaattcaaaacaaccttattttgacaaaaaaaaattcaaaaaagtcaacaggtttttgacccatgttttatcccgaattgacttgagttttttatcagatcaggtcgagttaattcttcctttatttttttaaactcgaaccaaattaggttccggatcaacccgtaaagtcaatataaaatagatttttttatatatttgttttatgtattattcactataatcaaatatgatacaaaaaacaattattttatcttatatatcattaccaacacaattttatttttattttatcttcattttctcaatcttttctattatagaatagtaactaaatgacagcttcgttcctgcacgagaccaggataatatttacttataatactcctaagcctgagaggagggacttgacatggaactaaacagttttcaaaaccacaagtgcagcattaaagttgaatcctgtacctttactgtctaggataattacttaacaaaaaaatagttttgatgtaaaaaatattttttaaaaaataaaaaaaatattattttaatatatttttaaataaaaaacactttaaaaaatatttattatcagaacttatttttctacaagcatgtaattttttttagtttattctctttattattactattaaaataaaatcagcaaacccaaaaaacaaggcatcttcaatacaatattatcaattattattttgttttattcccaattccaaaaatgggaaggctagttaaaagcgttctcgatattttgccaaattaccaatgcatgcgaggacatgacggtgattatatttcacaacgaggtcattgtaggaaacagaaatatcaccagggtaatataaatacgtctacaaatcctgtcagtttccctctctctcgctcactgcctgttcttgtattagcctgcttctcctctctcgcggctagggttttagcgcctctcttcaggttcgattctcgatgttctcctgttctctcacatgtccttgttgattagctcctcttatcgtaaacaagaaaatgttgtttcttttttctctgttaagcatctgtgttttgaatcagttttatcagcctttaattttagaaaagtcttggttcttgattcttcgtgcctttcttgttttctttagattatttacggttttctcagtgaatgttactggcatacatcgtcgttgatttttatttagatctagttttttctgtgttggttttgatatatctaaaaggattcctgtattgattctatgattttcttcaattagtttaagcactgtcactaaaataaacttatgattttctgtttaactgattaataatcttaaattgctatacaaatgtgtatcttcaaaatgatatgctgctgctaaatagaaagtattttttatttttattttgggtttcagtattttaaatattaagatatatttgaagttggcttaaacattgttttttcgattgatttgtggtccgagtacttgcatcttacccctagagaatttgttattattctgtattttacaagtagacccagttgcatatttgagcttactttctctacgtggtttcagtgtcccagtgttttgttcttaactcttataacctttatatatgacagctcaactctattacataagt

SEQ ID NO: 96 - DNA, 3847 bp, Poplar sp.
taaaaaaaaacacataaaacatcagcttaaaaaagaaaaaggagggaactaagcaaacctaggtgaatctcttaaatctagtctaatctaaaaaacttgtaacttgttaaatcatggatccaagtttcaatcaagaaacttaaatattatccaatttaattttgaaatatgaaataatttaaaaaattattaataaaaaacatgaaaaaaaaatgagtagcaaaaaaaaattgagctaaaatctgatagaaaaaaactcaaataaagatgaaattaaaaaaaatattaaaaacaaaaaaaataaaattaaaagaattaaatccaaacttgaaagataaaaagtcacaagggatgaaattaaaaattatttgtaatatgatagattatttatagattaaaaaataattgggatgaaatagaaaaaaattgattatttttaagcatcgattattcgattgaaattcatgtgaagttttgccagtgagaatttattgacagataaagaaatgtgcacggagtctattggcggacgatgaaacacgtatttctccccgagcagacagtgcttgtaacgtcaactcactcttttttcctctcatatggtaagcatctttcaacgacgaggggcctgtctggccatataaattgaacatttttttttaatccaactttcaagaattggagcgtttgattacaaatctgttttcagagaaagcacgcgtgtcactcgcagagagcagataaaacactatcgattattattaatacacttataaaaacttgggtggaaacactgttgtacagtgagccgtgctaatttttttttttaatttgatatttttatattagattaatttatgattgatttttacagtttattttaattgacttgatacaagattattgtagtgtcaggaaataaatgatagcttggttgatatttgatttggcaaaatctaagtcaattttattgatttttttttattgaatcctttcaaattatttttttcagcatttgatttatttggtcacttgactttgttttccttacaatcttatcgttttacaataggtttgatccagagttaagcttgatgatttattctgattggtttgacatgagatttttgtgatatcataaagaaagtggatgctcaattgattttcaatttgacaaaatcaaataaagttttggtgttttctcccctgttgattttttttatggtcaatttaatgagttagtagtaagatttgtaatataaaaataaaattcaatgaaagagtattgggataaaaagcaagttaaaaccacatgttcaatctaaaaattcacagaaaataattttggtttaaaaatcatttcacagaaactctctgtgtcggcatcgttgacggcgggatttcttacaggaagattaccaaaataaaaaaccgatggttccatctgactgctaaaacagaaaagaaaagaaaacaaatacaaaaaaatatgagcatttatatatttagttagatagatcatttatatatttggataagtgtactcattaaaaaaaattcttgctcattttttttttaatttgaatttaaaaatgacaaggtaaaaagcattttatttttatagccaccaacttaaaataacgaacattttaaagttgcggtgatgataatttaaaatgtttttttatttagaaatatattaaaataatttttttttattttttaaaaattatttttaatatcaacacattaaattaatttaaaaatatataaaaaaattattttaaacaaaaaattttaaaatttttaaaaatacgaaacatactgtttcgttagattactatccattaatgttagtttttcaaaaaaaaaaaattagtttgaaagataattttattatatattaacaaatataattaccaaaataactctgtataatttaaaaaataaatatttacatcacaatgaaaaaactatttcatcccaaaacaaggggacaataaagtcatgaaactattataataaatagtattccatgtcttgtaccgtgacaaggtaaattcccaatgagaattaattaacgtttttgataacggtcatgtgaccttcctgtgcaggtatatgtgctgtgacttcaatgattcactgccattatgttgaggtctcgggcttgtatgaaaatgtatttatgattgtattttaaaatattttttatttaaaaaatatattaaaataatattttttattttttaaaaattatttttgatattagcgcactaaaatgatataaaaacattaaaaaaatttaatttaaaattaaaaaaatttaattttttaaaaatatttttgaaatataaaaacaaaacaaaaatattattatgttagtgaatactgtttaataagaggtgaaataacaaatatagaaaggttgaagggaagtttggacacattagccttttcatcatgacaatttgttcgagaagaatttaagagtgaattgaatttttatttttttttatttactgggttaaataaaaaaaggagacaacatgcatcaaagctaccccacattgattattaggaattaccacaatttatccatcaatctccacggcaacaggtccagcccatgtgaaagaaaatccttttttcggcccaaaagagaatgttaagatattcgttttcactgagcagacaacacgacgtcgttgtctacctgcattcggcagcacgcatttccactcaaaatccttaaaccggaatgtggacacaaacaacacttctacgctctctcacgcattccttaagcgcgtgaaacaaccccagtgtaataataagttcggatttagcaataagtgcatctatgcgattcagacatagacatggctataaaggtcgcaggatgatatatttggtattcaaaattattctgagggtaatctaggaagaacaaaatatcactttagtagtaatataaatatatcaaaccctacaatctctccaatccgtcattagctactctcctccttccatctctctcgcggccagggtttaatccattctctcgtaaggttggattttctggtacatgttatcttctcttgatttccgttgtagttttgatcaagattacataactgagttgctgattagtgacttatttgtcgaagatttgtgatatatttctcggctttagtctagaattttaagctgtatcctgcgtggatttttttcgttagtttttttttaattcttattattttttatttcgtgttataagttgctgcatgaaatttgttcttgtttgacagatagatctaagaaattaatcgctgtgatataagatttttcgaagataaataccgttttatacgtccgtgttattttcattggcatattaaaatatggttttatatagatttctttatgtttgtttttattgcttatgcttttacttgggcgatgattttgttaatatttgagataacagacttgcagttttaaccctgtagttttgaaattgaagctggaaaaaatctgggacgattttatgccctaattattatggataatagttattagattttcatgccgtattttttaacagtcatgcggtatttacgaataactattatctaaacagttcttccagtaccgcctttgtttatttcttagttctcttctggtgtttaattaataacacttgtatataatctgaaactattaatttgatttgacttaatactttatgttgagtatgctttcttcttgtaattttttactctaccattgattgtttaaacatttcatatcttcttgtataacagttcagctctaatatatcatc

SEQ ID NO: 97 - DNA, 3642 bp, Poplar sp.
attttcattaagtggagaatgataaaaaaaaaaagtattggaaaaaaaacttagaaataataagggtttaatataaagagtgttgggcccatgattaatggaatgcaacctgtccttagccaacggaccagaacaaaagctgcccgaaaataaaataaaatgaacaagaaataataatggtttttgtaagttttacacatattaaataaaagataataaaaggtgaattcatcgtttttcttctcacgaaacattgtttcacggaatggtattttgatttatttttattttttttccttttcttttttcttttctttttttaattattttttttttaattttgaatttattaaggtttaagttttataatttgtttttatttgttttttacatggttatcatagtttcatgctataggttgtggatttaacaagttaatccgagttgatttaagttattttttggttattttttaattaatttttttttaattttattctttaatattaagttgattaggaattattcttttataatttattttaatttgctttttataaaattatcaaggtattagaactaagattacgaatttgttagattaatccgagttgatccaatataatgctatctagacattaaaaaaaatgatgtcagtttgaaattttttcgagtcgggttgtctaagtgatttttatatttgtcaagttgaccaagtcatatcagaacaactccacatcatttaattttttttttattgtagaacatattagtaatatctagatattatttttttatattaaaaaaatttaatttgaccaacaatataataggcgattgaacgataaattatttactattaagtgatttttttttttttagttcttagtttaacgtgggtgtccgggccagcttgcgcgcacctcgactaatcccacgggccctgaaattaacgaccatgtaagcctccagtggtcatcatatgagcaatcacagggctcgaatctgagaccacagagggagcaaacctcttggtcccaagcttttatcactgggccaccacctagatggttactattaagtgattattaatagttgctgtgcttgctatatatgactagtggcttcctaacacatccaatttcagtgacaatcattcttctcaagaaggcgaaagataatgaattttcctggaggtgtgtacaggagaattgcttgtggttcttggagaagattccttattagaagggcaatccaacttactattgttgccatgtttacaatttcaagaacaatgcaaaatcttctctgtcaaaggctgcgccatacttccggttggtgccattgtcaaaagtctctagagagtaattagataggttgcatggaggtatcatccttgttggctgccgatcaatatcggcgaaagaaatcaaatggagtatgcggtgaaggaagagtgagccatcgacggcgctttggaggctgtagtcgaatcagctgcttctatgcactggatcccatcccaacttgcatagcagtgtctttcattgcagatctgatatgaaaaatgttatgatgttcattctatcaatactcactttgattctgtagcgcacatatcttttctaccgagtttacagtgtttgaaagtgtgatattaattgttttttaaaataaaattttaaatgtgtagaatctaaatatattaaaatagaaattccaagtgattttagacccaatcgtaaggttatggactccaatttcatcatcatccttggattggcagtgaggtaatgatgatttcagacccaatcgtaaggttatggactccaaaaacagggcttaccattttttttattattaatattaaaattatacttgttaaactcaataccacctaataaattaacttgaaaaattctaaaacttgattcattttagatttttaattaaattaaattaaatattgatttaattaagttcggttaatctagtcaaatctaatctaaacctggttaaatcaatataaaaaaaataaaataaacttgttttgataaaactaaagaactcaaacactcccaagatgtttaataactcatatatatattttcagatattagttttgagagagtttacagttatgattaagaatatatttggattagaggtatgatggtttttttaaaagaatataacatcttttaaacataaattatatttttaaaaactaaaaaaacatattttttacttagaaaaaaacacaaattacatctcatccaaacacaccgttacaaaaaccacactgttacaaaaacccattaagaaagcaacagaatctcattggttaagctacggctacgcaaatgaatgtctctttcgttggctgagatgttgataaagccaagttatcgtgagacagaatcaattaaatatatagtgaggcaaccaacaggaagatgagaatggctattcaatacgtgtttggtaatgacttacaaatattttttatttaaaaatatttttttatttttaatttttaatatcaaaacattaaaactattaaaaacatcaatattgtatttttttttaaatcaaatacacttttaaatatcatctaaaaacaaaaataaacagtgccttattcttctaattagccacacatatttgccaccttccaatatgcctttcttttcggttttttttcttcgatacttcttttgttgtgatattttacaacgcttaatgttttttttcttaatttttaattaattttttagatcttttttgtttttaatacattatatcaaaattataaaaaatattttttaaaacaatcactttaaaaaactgcatgaaacacgaaaataaacggtccttcgaaaatcaaccaaaaaatgtggggtctacaaattgaatatcaatttttaccctaacctcgttaaatcactacgccgttaactcatcgcttccatcaagcaaagatccataaatagagcccgtatcttttccatatccttcatttctttctgggcagcttctcttctctgtagaccctgccctctccctccctccctttctctgtaagccatcgccatgtctctgttcctattgattttgatatcgttattgtagatcttgatctgggctttggtcagattagtcttgttttggttgtatagtctgttttttctttcttaaaaatggtacatagatctgacccatgttagattagatctgttttttgtgtgtttgttgagtttttatatgaccctttttcttgttttgtttgctggtgttgatttaagagatttcatgaatcaataaaattcgggtttggtgtgaaatattgaaatgaaaataaaggaattgaaaagaagactttatcatgtatataagcttggatctcttgatttactggtttttttaaattctctgataggttgaacatgttgtttgtgaaacagtatgaaaaagaaaagttttttcttgtgtttgtaaatgttggttaagatctttcttgcttgcatgtattgtttattttgattgattgacgtgatcaatagaatgttatggaaggtattaaaggcatctttttttgaagattgattgttgggattttgatgcaggcttgatttagtaaag

SEQ ID NO: 98 - DNA, 3699 bp, Poplar sp.
ttgcagctttagatagttgtcaggtatttgagaatcataattttctaatataaatggaaactgctccttttctttggagtctttcatggcttcattctgtgtgtttcttacaacttagaaatacattgtcaaagaccattgtggttgcgatgcagtttataatacccttcgagtatgcttgtcttgtgtaggctgtgtaaaactacagctattggaagtacaattgtttataggcaaatagaaaaataagaaagtgtgaacaaatgaataaaggttattttcttctgatggtattatacttgatagctcccagagtaaatctgtatttcatatgtggttagagctgtgttaacatgaaatcccttagctgcaatttttttttcctgagtaattttgatttcacaagctacaacagtttggactcggatggtaggttttaacatgtgccttgtatttattttctcccttgaagtcccatgcacattttctttccatgtgacttcttactcggttacttgtatggaccctttaaaggattaaaatgtaaaaattattaattggagcactagcaattgaatagatatcaaataaatttgggttgattttggcaagctctcttgtcagaaaccatagttcatagctgcatctaaacctcaccttgtgaactatcatagagccacgctatatgcatatctcttttgcagtcacactcaccttggagtttaataaaactgaaattgcaatgtgcaagtccaggatgcaaccttgcaatgtgaaaccaagcttgctaaccatttcttgggatgaatctaaacgattgtgaatgtgattttctccattataatttaaattaattatacctatgactgtgaaaagtagaaaaaggtaacttgatctctgaattagtagatggcttagatatattatcagcatttctaacgaggttttgttattttgcagtggtacctgttgcagatgtaataagaattcgcactggtaagccattgttttcttccaacactgatgcctttttgtctatactattctgatggatcaagccatgcatcttcttaattatccaaaccttcctgttctgcgattatgatgatatatgacaacactctttccttccatgcaccattttcaggtgaacgtggagagaaggctgaaaggatgacaggagggttgtctgacatgacattttctgcatgactggtttaaaagcaacatgcgcagctcaagatttgcatctaacgctttcttagtagctagtatagtcaggcatccatcctccgcaccccttgtcctagtccttactagaaaatttgattcctcctttttttagcagtctatcttgggttgaacgactagaaataaaaggaatgtctatgagcgtttgttgcaaggaagtaataacaagaagatggttgtgtgtgatcacacgaaggattaggtcgccccacagttggcatacgaaattgttgagtacatgctgtggggtttgtactgagctatgaatattagtgttaaactgtattttattcgccggtggacacttccctcattgtctcatcttgtacagcatgttcttattccttttacctaggcattgatggtgctacaggtggtcattggatcatgtgctttcttagggattcgataacctgagttgaaaaatggttccattagagagcggcgtgatctgtagagactcattattgcctcattctatatacgcaaatcctggattgttgaacctaaagtgatcctatgcaagtttagatttgattatatgactcccttctgctatttttatccgcggcccctgtttggcattgcttcagggttaagcaaaatttgattttttgttttgtttaaaattatttttttatgttttgttgtactatattaaaaatgagttttaaaaaataaaaatatatattattttgatacatttctagatgaaaaatactttgaaaattgcaccgcttttccttaattgttttaaaattttattttattttacttaaaattaatattttttgatgtttttagattattttgatgcgttgatattaaaaataattttaaaaaaataaaaaatatattattttgatgtatttctgagtaaaaagtattttgaaaagcaatcgtaatcacattcttaacgccttaaaaccggttaatggtaagggaacgaagctcttatttatcattgtgttagggttaggatttgacaaaaattaattttttttttatgttttcatgtattatattaaaaataaattttaaaaactaaaaatattattttaatatattactgagaaaaaataatttaaaataaaaataattattataatatttccaaacattctcctagtggattaggagtggcacgctcctaatataaggtcttgcaacaatattttgattggttgaggatgtgtctagtgaaatttcaagttttcctttcatacataaatatatttattgacttttaaaattgtctaaaatttacaagttaacttgtgatttcaatagtgttgcgtggaatgccattcataatattaaaaaaaatatgaaaattgttaacttattattattattattttattttaacttttgaaagaaaaaaagtgtatcaacggattgatgagatcactgattcggcagaaaaaataatagtaaaaaaaaaattgcattcttcatgcctgaagtctgacaggagactgagcttgaattaaataagagcctgataacaatgacgcgaggcaaagagtttccaagtgccgggatcagaaaggcccgatcccgaaatgggaaacacacctcctatttccaaacagggtgcaatctccaactaacgcaggccaccgcgtcgtgtaaacggcgtaacaagggtaaccatccattaataggcaaccacatggtcacagatattgacggcgtattggacagttaaaaaaaagaaaaaaaaggaaaaggatcccgttacgtcctataaatacacaccatcaatctcttggaacgtgaaaatatttttcccttaaagacagctcctcctcctactcttcaatttaattccgctttattctctcttctgaggtagatccctctctccctctctcggctccttgataggcaagtgtttaacgattccgaaattccgaactttagatcctgatcttgtgttcgatcactctcttaatcgaattgttgaatgtttgtctgttggattctacgtcctgatctaagatttagagcacgatttggtttcggaatggcttgatcttgatcatgatgtggtgttgccttatggatcttcatattatgattatgtttttgcatgatttgaatcaggtgatgataccttagatttggagatcactagatgcaacacatcctgtttggtacctgatctgttagaaatgcatgtctaagctgtcgttttaatgtgttttgaattgaatatctgagtcttgtaggttcatcgtgatttttttgtctttcgtatgtgttgttgatatggctcatttatcaattaggtttctgatttgtgattgttttttgaaatgtgaaatgttttaaatgaagctgattgagatctagtttttgataatggtgtggaattgcatttgatttaggctgggagatttatatttagtgatttgattttttgatatcggcagacgtgagaaa

SEQ ID NO: 99 - DNA, 3500 bp, Poplar sp.
aatgatgtgttgttgaagttttggttgtttatgtgcttatcgacggtcttgtgctggctcgttgaattccaccagcacataacatattcgtaagctacattaatgaacccaccttgtctttcagttctcctgtctttgtgaggaaagctttcaacggtgcggtgtacatcataaatcttatatccactttcatgttgttaatgtgtatgattatatttcgtgcaatgcatgtatttgtgcataggtggaatttggttgcattttttttatgctgatcaatcaaggatgtagttaaagttgaatttgattagatgccttttcatttgcacacaacaaatacataagctatattgagtagagccatcttgtctttcatggtttttcctcttgttggaatgaggaatgacaacccattatatggcagatgttttgttgtctgtggttgtaaatgttgtgtggttgaagttttggttgtttgtgtgcttatcgacggtcttgtgctggttagttgaattccaccagcacataacatattcgtaagctacattaatgaacccaccttgtctttcagttctcctgtctttgtgaggaaagctttcaacagtgcggtgtacatcatcataaatcttatatccactgtcctgctgttaatgcatatgattatatttcgtgcaatgcatgtatttgtgcttacattgaatttggctgtgttatcatttatgctgatcaattaaggatgtaattaaagttgaattggaatgatgtatataaaaaacaacctgctcatgtgctgtctgtcacccaggagacattttccgtcgttctatcttaaatattttgggcatttcatttttatcatgtcacatgtttgatggttaaggaattgttttcaatttgcttttctaatttgcacagatccgaccattgtggaggcattatttccaaaacactcaagggctcatctttgtggttgatagcaatgatcgtgaccgtgtggttgaagctagggatgagctgcaccggatgttgaatgaggtagtcataagctttaactctcacttcttacttttgcttttgtggttatatgctttttaataatggaaatttattgtttgaataggatgaattgagggatgctgtgctacttgtgtttgcaaacaagcaagatcttccaaatgctatgaatgctgctgaaattacagataagcttggtcttcattcactccgtcaacgccactggtaattgataacatctccatcgccaatttctcgatagtttgctgctatgtaaatatccgtggatgtcatctgagctgtgtgtttattgcaggtatatccagagcacctgtgccacttctggtgaaggtctctatgagggactggactggctctccaacaacattgctagcaaggtagggtcctaactcgtgtcttgtaagaaataatgataaaaagtcttcgggttttgttggatgtaactttgtctgctgaatcgtggcaggcttaagagatgggtcgatatctgcagcttttcgggcagcattctgcttcaatttgggagacattgttaggttgtttggtgttcaaggattccttatcctgtgaggttgttaagagaagaatgtatttgtttggttttgtaagatattgttaccgtaatagaaagtggcaaattatccctaatagatactaaaataattcatgattcacagtttttaacatgatgtatcttgattcaagtcaggttctgtaattcatgctattggggcttttgtagagtatggttctttcattgaccagccattgcttgattccggcggctgccattttaaattacaataatgctgtaaaactttgaccgaatgcatgtacatctcccgtgttgacagcttgccagtcttcagacacgcatgtatttacatctagattctgttcatggcaccaggaaaagtaacatggaaagaaccgacttctgagagaaatttcagtttgtgcctctctacatcatgagcctaacttttcctatttggccggccagctacttgcgttattaacgattcaatgttttttattttattttatcaattccaatagatttaatatccagcataacccaatctaaatcaattcatagttaatttgtatttcttctaaatttctaatctaaaattcatgatttctacttgaaatactattcaaattgcaagaaattgctgaagtagatctagaatcccctataagatattattcaagtcttcgaatctcaatttcttccttgttatcgtgactatgcaacccctctgctttgattattctgcttctctgatttttaattaggtgtttagaattttcctatcttcccttttgtttgcggttgccggaagagaagagaatcccctcttttttagctaatttactcttttatctcttcttaagcataatatgatttttccttccttttttttattttttttttattattttcttgatgccgcactgtttttatacctctttcaattttatttttaatataaaaaaataatttttctaaatcttaatttaattttttttattagtcagaagtttcaattaacactacttactcgtgatcaaaatcttaaggttctataatcatggttagaggtatcaatgaacattttccttcctttctttcttttctttttttcttaccaattgaactcaatttaatattaaaaatcgacagaagttagctactaagtaatcaaagataacacaaaaaataattaattaaatttaaaatacattaataaaaataaataatgcacacaaacacaatggtaaaatttaatatttctgccaaattaaataataaatgaaactagtaattagaaatataatacatccaccgtcccaaaataaaagtacggtccagaaactgaatctcactttgacactaacgtcattaacggcgttaactcacgtccatggctagattctatacgcacatagataaatatccccttctctttctcatttctttcatctcccatctctgcacagcttcttagtagatcctgccctctctcttcgtcttcgttctgtaagtcgtctctctctatatatatattgttgatgttattactgtagatcttgattggtcttattttggttctaaagtttgtttttttgtttttgttttaaagggttcatagatctgacccgtgatagattagatctgttttgggatgtttgttgaatcttttgacgacccttatgcttgttttgttagttggtatcagcataagggagatcatgaatctatagaacttgggtttagtatgaaataatggaagggaagtgaaggaattgaaaggaatggggtttttaatttgttaaagtttggatcttttggatctgttgatttttctatgatttgtgagatgatttttcttttatttaagtctgaatttggagtttttgatttactgatttgtttttgatgcaggtgagaaggaaag

SEQ ID NO: 100 - DNA, 3114 bp, Poplar sp.
tatatatattaaaaaaataaaaaaaataactcgagtcaatctgaattcatcaattaccaggcattttcttgtcctaccttattgtagccattaaatatgcttgtatcatgaatataaactaattccatttaataagttggtcagttttttttaatcatatatttaagaacaatggtggtgctatcagaaggaagctgagaacacaggaaactcaaaatagagccaatgaacccatggttttggccatgtgcagatcaacttgggcacgtctgtatatgcaagttatttatttgcgagacgtggacgttgtctgattcaaagttgcaactagaaatttagtattcgaagctttacattattttaattattataaaagatacgtggtatacaatgcctttttacaagtaaggaaggtgtgacgacgacgtcttggacttggagttgctcccatataaaattatattaataagcgagatttcaagatattatttatataattttttaataattttagataaatttttaataattcataagaaatcttttttttaataacctaaatagtaaaatacaagaaaaatttattaaaattctaattaaattaaaagttttaatctaaataaaaaaaatcttaaaacaataatgaaagaaaagataattaaaaaacaatagcttcttagcctaaagctagcggagggggcgtgcaaatgcaattgcaaaattgataaatttaaaaaataattgtactgataaatcggtttttggtagttggaattcgtaaaattaactttgaacgatatacataaattcaaactcatcgtgtttcaaaattcaagtcaacttgtagcaagggaaacattgtaatgtaatttttcatattaatttttatttagtgaattgaagaaaggattgagaaaagagtcacgtatttaattgagtgcctccttttcctatttaatacttcaagctttggtttttgaacaccactagataatttgtatgctatatgtttcggattcgattaatattaaaagatatctaagtgttgataacatgttttctaatataaaaaaatttaaattatataaaggttgattcggttaacttgatggactcaaattcaaacctcgaattatgagattgagataactctaatataaagttcaattctcaatcaaatcgaaacaaaatatgaaacttaatttctaaccagccttatattaaagtctagaactaaaaaagaaaattcaattaaaaaagacaaaaaaaaaaaacaactcgagtcaacccgggttcacgtgccaaactcgcaacccaggtcatgtgattgggataaccctgtataaagcaaattgaaataaatcatgaaactcgattctcaatcaacccaatgttgaataataaaatttaaaaaaatcgattaaaaaaacttaaatcaacccaccaaacccgtgactcaatcaatatgaagtttaattctaaatcaatcaaatattaaataatgaaattaaaaaaataaatcgataaaaaaaacctcaagttaacttgtcaaacccgtgactcaggttatgagatcaaaataaataaatttaatgttaaaggataaaattaaaaaaaaaaaaacattgttcaagtaagcggttctatgtaaggagagtaccaacgaatttctcttcaattaatttttgtcaatattttagaagtgtaacattttaattttggggtttggggcatttttccaaaactattttgaaagcttttagaaaaccagcatcaattttaaaaaaagttttaaaaatttaggagtcattgttactctatcctaacccatttgaaaatattttttattgtaaaaagaaaaaattgtatactatcttagattaactacacaattattcatttccctgaaaagcaaagagggatttggatcctctcataaccctaacaaaatataactaaccatgttttaaatttcatcattaattttaaatttagtattttaaatcagacgaggggaaaaaaataaaatacaagttattattagataggttacacgcgttatgaagtgataagatcaaattttttctaatataaaaaaaatgtttaggcgaaactagcttttttaaaaaaataagaaaaatataaaacatgagtcattgacttgactaagttcaataaactcaattaatttaataatatgtttaaaaagaacatcgatagtgaataaaacaaaagaaaatagcaataaataactatagagaaaggaatagccaatattgtactcgatgagaaaacaaaacaagctcattagagactcgttactagaaaaatctcatcgagatggttataatgttattgcgaaagggcgacgatattgaaaaagattgcacacaccgtaagagtaacaacctaaaaagcgagcaaacaaatatcatgaagtgaacatctcatgtttatatttcattaattaatttaatttaattaaaaaaaattcttttaaaaaagctaaatttaaaaaacaaaaaaaaacacataagataatcccttaaatcaaacggtcctcctgcaattacaacataccgtaactgtgaaaacctagttccttccacgtcatactaagaccctgtttatttttgcgttttaaaaatatttttaaaaaaaattaaaattttttatttacttcaaattaatatatttttagtatatttaaatcatttttatgtgctatattaaaaataattttttaaaaatatatattattttaatatattttaaaattaaaaatattttaaatattcaaatttcaaaacatgtactaaatatcgtctcctcccatgcaaatttttcacaagcagacaaaaccaccaataaagaacccacaatccttgtccatgtcatatctgacgcccgagaatcatcgcccctgtggcccccacgttacatgtccccattgtactatacaacatcataataaaaactccccaaaataaatgaaattacgaacataccctcgtcaatttccctataaatcccgacgcctctcccgctgatgattccatgtccaaagctgtgtgtatttcttgcaaaagaaaataatatttttatttttaaaaa

SEQ ID NO: 101 - DNA, 3058 bp, Poplar sp.
aaggagtataattttaaacgggaaattattttccttctttccttttcctttcccgtacttttttttttaaaatatattaagatacacatttacctatcttcaatgtttattaacattctacattattttctctctttccacaagcacacatttctgtcgcataataaaccacaaccattttgaacttgtattatcaacagtctttccaaacatttcttgactgtctttcgaagttccttacccttatgactaagatccgaccaaaagattaaatttctttgggatactgtacacgtaagttattataaaatggctgcgctcttccatatacattttttaaaaaaaaatctcataaacccttgtacatatatattttcttccaaatagatatctagaagatatataattagggtttgcatgaggtaaaattgaaaataaaagttactatctagttttataataactagtgactttaattggcatttagagttctaggtaagagactgattatttaacaagaaagataataatcatcatgtacattttaattacataagataaggtacatgttatgctctagctaaagtttttctaaactagtatatgtgttgttattaaaaaaaaaattacgaaaactttaataatgatttggaacataagcctgacaataagacttagtcctcatttttagaatacatattgaactttaagttgattatgtccaaatgaacttaaagccttcattcacactcaataggtcttggtagggttatattcacccaacttaggtttacttgcaatgatggggtaatatcctaacacatctaaaattataaacaaacattggtatacattgatactacacatcgagtaaggggttggttatgctttggagaagatagaaatcatctttctcgtatcttttcaaatgaaaggttatcttaattatgtgttttgttttaaatttatttttacacaagcaattattgtccaaattattttctaagattattcgtaactgacttattattgattgatgttcgctaagtctgcatcaagcccttaatcaaaactctcgctaatcaataatttattttttatctttttttttattattaattaaaagcactacgctaggcctaaattaatttttaaaattagaagacttgttgacctaactattaaaaataaagtttaattaaacacatgatattaacttgatgaaaactcttcgactcattttgaagttaaaaatattgtgctaggcctaagtcggtccttaagactaggagatacgcctatctagatgctaaaactcaaactttgatcaaaacataatgttaaacttgatgaaaactcggtgaaacatttttattcttagtttgaaaaataaatatttacactcacatgaatacataaaaaggaatcaatgaaactttacaaaatgaaagtaacactattgtgaagccaataaaaataaaaaataatataaaaactgcatgagtgaaaactatatgatttttaaaaataatttttacacacacatgcatacttaaaaaagtgacaacactgttttataaaatgaatataatgctacttttaagccttaaaaataaaataaaataatatgtttgaataaaaagttgttgatttttgaaaataagtatttacacacacatgtgtacttaaaaaaagtgatagtagcattttctaaaataaatctaacgctattgtgaagccattaaagaaaataaaataaaaaatacacgagtgaaaagttatctgcaaattaagacaatcgatgcattaatttagaaaataaaataatgctagaaatgagaataggatacaacattaattttaacgacacaattaaaaattaataaacttatatatatatatatatatatatatatatatatatattaaaaaattaaatgtaaattacagattgagatgagaaattaactattttaacctcctgacacactggccccatcagggcaagttgtctacgtgtcaacatcatgcagttgttgaagttgtgatttaattcggtgattggatgctcatgcatgtgagattttagttatatatccgtcaaaacaattttgattacttgccctagtttgtgtaccatttttattagaccaagaagggtaaaaataacagcataattttaaaattaacaatcatataattttttaatatttattatattaataactacatgaatcgacataaaccctttatttagtttaaggaggatagatataagctttcatatgccttttttatgttttataagattcctggccgtctccctcttgaacggcttttcagcgtgaggttttttttagattgtgttgttattaataatgctttctcataattattttcttatacgtgctatttaagtgaaaacaaaactacttcttaacggtgaaatccgaaaagaatcttgataaagggttcaaaattattccgacaaggtgggaaagttgtggtccctccataaaataacacgatgtaaaaataattttttaaatttttttttaatttaaaaattgtattacattaatttattttaaaataataattttttatataaaaccatctaaataacaaataaaaaaattaaatttcaatagaaagcacgttaaacctcagttccatgtaatatattatctacttttttttatcagagatgtgtttggtattataatttaaaaatattttaatttttttttattttttattttaaattaatatatttttttaatattttcaatgatttttatatattgatattaaaaataatttttaaaacataaaaaatattattttaatatattttaaaataaaaaatattttaaaaaacaattaatattatattcccgttccttaccaaccaagttggtagctggccacaaaacgaagggctatttggtaactaacaattcttatgccttttataaatgatggatacttcatacttgcaaacagagaattggcaccagagagagagagccttgttattttttgacagagatcgaag

SEQ ID NO: 102 - DNA, 3252 bp, Poplar sp.
cctcataagcatcatggtgctcacggcacatgatctgggagtgaatatctgctgttattgaaccattgtcagcttatgagcaatgttctttggagtgctttggtcttgctttatgagaaattgtattgtttttagctaattagccaaaatcgatttttcttttactagtaatgaaagggtgtttatataacaggtgtagcctaacgattggatgtatatgtagttgctttctttggtgaagcaggtttgagtcttggtgacatttattttggttattactattttacttcttttgcagcgctacaggttgggccaagtattttttgaacttgtgtaattttttttataaaaataaatgaggcgaattgtcgcagacgacagcttaaaattcggctattatttggtggttggaaaattgtgaaatataaattttcggttgataattaatttccaactatttttcatcttaaaatatctaataaataccataaaaatctttttaattcacatattaactttaaaatcattaaaaaaaccaaaatcaattgaacataaaaaaataaaaacaaaacttaatactcaccacaatcaaactcttcttcattgaatagaattagtagacactaaatttaatcatttttgttattggtattatgataattaaccctttttttttcataattttctcttatctctctccaagtcaataactgaaaaataaataaaataaatttttgaactaaaataaaaattattgtaaatttaaggtgagtgatgtattttctccatattttaatttaaaacttaattttatataattaaatagtaaaaaaatgcaattaaaaaaaatattaaaaaaaatggcaggagattcactgttaatatagatagtgcctgcccttcaacttttattagtttttattaatgtaatagatttgaaatccgaccaaaaaagggttggattctaaacgctttataaatcaactcgagttaattattttttattaatataatactattttattcttttaaaaaaaatactaaaatatggattagatcaacagaatcatagttaacttttcatgttaatcgaatttagactagccaatttcatcttttgtttaaattgaaatccaggcatggcttgattataggtggtgggttttccgagtaaaacccattgggcaagtttgaggtgaacttattggagaaataaccaatttaggtccaccagatctttaaatgcaaaatcccaaactctaaacaaagttatgtcactgtgttttcttttggtagaatctcttaaagaattttaacagtgtgtttttatattgttttttaaagtattttttgtttgttaaaattaatttttgatatcatcttattaaaacaataaaaaaatattaaaaaattaatttaaaataaaaaaaaaaaaatttttaaaaaaattcaactacaccacaaaaacaaacacacttgacacacctaacaactgtttttcgaaaaggtaatggagacttcaaagatggattcccatgccacgttaaaatcaggaggaaagacttccttttctctttcctgtgcttctctagaaactacttagatgttttcttttttaacacatgtttatcccaaaaaatgagaatttatatttttagatcaatgaatcgtggacgtagctccaaagattttctttttcatgaaagtaggcaccaattgcttgcaaattgttttccaaaaactatactcaaattattcttcccaccaagacttgtccaatcatttttggaattttttctcaaaaatatcataaacaaaatctacactttatattaaaaaaaaactcttggaattgcaagatttgcaccaagaaattcagtagatatttttgagtgacaattagcaaactttgaaatgctaaaattaaatgagagcgtttggaaatgtggttgtatccgcatttttaaaattttaattttttttattaaaagttaattttttttttgtatattttggattgttttgatgcgttgatctcaaaaataatttttaaaaaataaaaaaaatattattttaatatatttcagcatgaaaaatattttaaaaaacaatcacaaccacaatcctaaacaggtataatattgcaaaatgaaaagggcatatgattcatcaagcgaattaaatcccaattcaaaagtggcttcaagcgtattgtcttcctttataagtggagccatgtcttcatcaaattggcttgaaaagtcaatatccaaccggtccgttcctacaaaaaattgagaaatatataatttaatactaatgggtgcacttcttaaaattaatgaaaatataccttttttattgtacctaattaacatttacaattcttactcagagaattgattttttttcttaaagggttttttttaaaaaaaattaattgataataattttataatttaatataatttggttcaataaaaaaaagaaggaagagggagagattattttccctcaaggctatttttacaagccacgagtttttaaaaacggaagtacataatcctcctatatatatataatacaaaaaaagagagaaattaaaaaaccaagtggagtaaagtaattaaatagattttgatggcaattggtttgttttttcgagtaaaattcaataaaggtggtattattcactaactatgtcagaaaaaatagaatagaatccttaaaaaaattttcgtttaatttttatttttagaaatattagagactatttttatatgaaaacaaattagaaataggattttagggttaaaaaactctaaattatgcatgatactacaagttgtctaccgcacataaaatgacttgtcaaaaaaaagaaaattaaaaagaaaagaaaatggagtaaggtaggcgtagattaaaaaaagaaaaaaaaagagagagacgcaacatgatatatgaataaaaaccaaagttgttctcgagaacagtctcgcaaccctcagtgtttgccatcttggaaaagttgcaagaagaattgtaaacgactacctctctaggagccaataatatctcagctagccgtcccctttgaccaaacaaggtatgaccatgcacctctatataaatggtggatacagaataacaaaaccaagataaaagcaggaaacagaggcttgtattactttgattggcagccataacagcaaacagataaagggattttgtatttttttgatagagaag

SEQ ID NO: 103 - DNA, 3141 bp, Poplar sp.
aattgaaacgtcatgcaaggaataaaatatatttcagtgcataaaatttaagatttagcaattaatcatagaaaaaaatgaattaaaaaaagcctgcttttttctaacctaggtgggcccatgaattatctatcttccaggtctttaatgatgtggtcacagaagtcaaaagagaaagataagaacaaaattaaagcaaattgatgatgcctttgtcatttccacatgcgtgggtcattacccttttactactgaaaatttaaaagttcaagggcccattaaggcccacaactaaagccctttagattgcccccacgcaggatcgaactacggaccttcagtttacaagactgacgctctaccactgagctataggggctaactattaaccttatcaatatttaagcattaaactcttttaacaccttgtagtctcatctcctgtgtgagtagactatcatttttttaaaaaaagtgacagtatatatatatatatatctttttttttattaactagatttttctggattaatatcgtatttgattcaactaaaaactcgaaaaattatgactacgaacattattataatttttatattccaataaaaaacgagagacaacaaagttatttcatactcctagcatgagattacttacatatgtatgtgtagtaacagctaaaggatcaagggatttccatattttcatgttgtaattgtgttcttgacaatgtattaagtgatgggaggatcaatatttgtgttgcaggaagagtgccacagcaacagaagaagaagccaggaggagaagagggcatcaccaacattagcttcttcgacaggatcatgagctatgagaatatggtccatggaaagggccatgagagagtagtttcatcacctttatggacaagcaaggccatgatagagagtgtaaatgaggtgtgcaaggatattgcttggggtgagagaagggaaattggaagaatagggatggctttgcaagattatatatgcagggacttgattgaagagattgttaaagaattgggatttgactgcatttatcaactaggtcctctaccgtttgaatcgtgtaagaaaagactacgtttctagtgcccttaggccccccttaccatagtttttgcactgaccacagcctccgttcaaaataatttttttcttcgtttggtgctatttctaagtttttttcttttttttttctttagaagtgtgttgtttcttgtttgatgtaatctagaattatttttttctttttataatatcgtgtaatttgtgatagcataaaaaaaaaaatgaatgaaagtgttaaattaaaagaattatattacatttgtatcctggtatttatcactattattaaacttgatattaatctaaaatttaaatagggttaagtttccaaaaaaaactattaaaaattgatttagtcatattagatacgtattaggataaattactatttaattaagctagttaaaacctggtttaagcttttagattttattcaaaataatattattttttatttaattaaaatatttttatttttatttattcaggtcaattcatctgactgataattcaaattacaagtcaatttatatttaataattttaatatttatatggactaaaattttctattaccagacattaggtttgaacgaatacgtgctattttgtattccatgagatctgaaagcttataatccaatgaatttaaccaaataattaataaataataaaagttgaggtgtccaagttacatggtgagtgtgatgttttaaataactaggaaaatactatcactaccagtctaccagcaaacgacatgctaacattgattcgacaaagccgcctaggaacagtgcgatagtgagggcgatggagagattacgtggcggtcaacgcgaaacacgtgatgtcatcctccgcgtccacaccgcgtaaacgcgtacgttacctttttgccatttttaatgattcgctatactcaccagccgtttcaccgaaaattactgtcggccagtaattattcagcaaaaattcttttaaggattaatgaagcttacgtggcgtctcgtgaatgggggatactaataatggctagtaattaatgtcctgttatttacagatctgtcgagctagctcttctgctcatgattggctttcttggacttgattcctgctgctgtacgattttacccctattgattattgtttatgacaagagggtattttcttcaagtaagtgtttaatttttgcaaatgactgaaataccttaaaataatagtgtactatataatgtatttttcaacaaaaaaaaaacactctaccatagcggtttaatggcatctattaaaaaaaattgattttttaatgtttttgtatagaaattacgtgtacagagacaacaattgtgtctgtttaaaaatgcgattgtggttgtttttaaaatgtttttcatgctgaaatgcattaaattgatattttttttattttttaaaaattatttttgaaatcagcgcatcaaaacgatccaaacacatataaaaaaatttcatttttagcaaaaaaaaattaatttttttttgacttttcatcctttgtgataattaaattgaacttgattttttaaaaaatgttaagctaacttgacttccttcaatttataaaattaataactagatattgatgcatgatccattattcataaatattaaacatcactaaccttgtgttcttgttctttaccatgaaaaaaaaaataaaaaaaagctaaagagaaaaaaattcttttgaagtaaaaagcttacaatggaagggcataagggtcatttatggactaatcaatatcaatttttttaaaaaatacgaaataaaaaaaggaagaaaagaaatgagaggggcaaaatagaaagtgaaaaagtgagttggaattgataaatgggtcacgtccgactagaagaaagcttggggtggctaatttagctcgtataagaacaccacatcttttgtctgaatctaaaccaaaactctccctctctcctacacgcacgttttctccatctctcaggtttttatctccttctaggtttcatttttcaaaagagaa

SEQ ID NO: 104 - DNA, 3186 bp, Poplar sp.
gccgcaacacgtcgaccaccatataacaactgttcaatctaatatgaagcaaatagaaattattaattcataaacaagatgcagcggttttgtccaaacctataaaaagtaacaaatacgtataatattttggatccaatgtgcatatggatagtactccatctcctcgcgtggaggaacctgcgctgggtttggtataatgatttgacgtattatactcataggtgggtgacttatttattttttgtggtaagtttgtctcccttgagtcaccattggtgacctttctttgtgtcgttgaatttgtctcatcgagatatttttaatggtatcagtagtgtcgtgatcagagcttcagtgtgtcttcgagaactttttttttctctcctctctcccacccatttaataattttttatggatgccgttattctaaatagcgacaagttataaatgtcacgtttctcaatcgcgacatatacaaattgtgttatttcaccaatttttttcaactattctattcctttaatttttttaatttactatcctaatttatttatttttaaaaatcctcaaatggcgatctagttataaaaaaaaaaaaattcacatcgccaccattttaactcatgccttaccctagctcaaatataaaacaacataatgtcaaaggattagttcgcaaaaaaaaatatccagagagtgaattgaaaagatgggttaaccttccaaactcgcaacctatcctagaccagagtttaatcaagaaactcaatttccaaccaatttaatattgaaggatgaaataacaaaaaaaaaagttgtctaaacaaaaagaattgcattaaaaagaatgatgatcaaatcacacacaaaaaaaaaaaattgaaggggggtgagattgtaaaaaaaaacttcaattataaaaattaattaaaacaaaacaaatagcaatcaaaagaatgtggatcaaatctgacatatgaaaaattaaaggataatgaaattgaaaaacaaataaatgttactaaaaaatcattagcctaaaaaaagaaaaaaaaacaagcgagcccaaaaaaatcctttaaaattaggttaatcttccaaactcataacccaataaatcctagatccaggttcaatcaagaacctatctcaattcctaatcaatttaatattggaggatgaaatcgcaaaaataatttaaattaaaaaaaaagttgtcaaaacaaaaggaattacaattaaaagaataaggatcaaatcacataggaaaaaaaaataaaaatggatgaaattatatataaaaaaaacttcaattctaaaaattatctaaaacaagacaaataacaattaaaagaatgagaatcaaatatgtcagataaaaaattaaaggagaatgtaattgaaaaaaatccaattctagaaaacatttcaaataaaagtagaaataaaaaaaaaacatggaacaaatatgaaggaataacaaattgaaagattgctttgaaaatttagagtaacatgtgtggaaatcaaggtggagagaaaaaagaaggaaaacaagaagagcagtccatcaatgccaaattatagatcaaaacgccacacacatcgtcattaaaaatagtcctctcaagatgatttcaaccacaccaaaacagctcgttgttaatcgctagaagctgctacacgcgtcatctaaatgtgatagaacgccccacacactgacacgtatattgcagccaggtttcctttcttagtaatatctatatttaataatatactaaattgtacttgaatcaacatattgcacatgtcggctaggattttttttctttttaaaggtatgtttttgtaattgtgctatgctaacagtaagggaaaagcaaaaatgaccttaaactatagcttattaattttttaagagtaattgtactttgctaaaaaaaaaaaagaagtaaaaagatggagttgtccctagtgaattttataacgactaacaaaccatttaaaataccgaattacccctaaaaacaaattccttgagtttttttaaaatagcaaaaaaattattacaccgtaatggtaaataataaactaaatctataactacattatttttgctttccgttttaggcttttttgttatacaatttgaatcaaattattattttgatggcagccaaaatcccattgtggtacaagcagagttgaaagtgaaaaagaaataaaataaagattttgagccaaggcaaatttgaaaaatccaaaatgagtgttttatttcataattagattgaacttgcttctaaactttgtcattacttctctgccatgcttaaaatcatcataactttgaaaaatatgatttatgatatattaaattgagaaaaccagaaaaaaaataattaaaaaaatcaaattatgataataaatcgattaaaattttaaaaaaacttaccggttaagttttggttttataagtctgaaaccgaaaaaaccgaactgaaccgaaactggtcggtttgaaccggtttcggttttttttaaaaaaattcagtttgattattttttttgataaaaaccaaactgaactgaaaatgatcaccctatcataaataggtatcatttcgttcattcattttgaagaaccagaggtatttgataaaatattaaatagatcatcttttattaaaaaataaactaacgcattttaaggaaaaaataaattaaaagaattattttaataaaaaaaatcaacgaattgtgagttgagttttgaacggttcattatcagcttaattgaatcaattcaagcctcgggtcgactcagacacatcagaaaacggggagctgacagggaagaatagtgaggggtaaaacggtaaaggtcaaagacgcgagtcgagagaaaggggttacacgtggggaagagagagaatcagatgcggaacaccccaatgagagcactttaactttaaattaaaaaaaggggcccacgtaggcttattcctctgcctatttatttttcaaagccagagtcagatcaaagcaaagacgttcacgcagagtcggatcaaagctaaaagaggcagcgagccagccatcagatatcgtcatcctctttgatttaaagcatttcttactgtttttattttctctgatattttctctctctccgaacaaag

SEQ ID NO: 105 - DNA, 6250 bp, Poplar sp.
atcaattgccttagtcaattggctaatatgatagatagtaaaatctgtcacagaaaatttttttacacaacatcttcactcaataaaggctgtctatggattttggagaaaaaatgataatgaatggttcatattgattctgttatcatatatttttcttttggttctccatcataatttgtgccccaccccccccattcagcttcggcttgcggcggagaagtatgaagaggcagaggcaagagctcggcagctcgagagacaggtacttttcttgtggttgacaagaaaactattgcgtgaatgtgtctgcagattctgatggaatctgttccattctagctattaggaaattgaaagcatgttatattcatgttggtgaagttcaactgtgcagatttttgctgcagcatgtatttgaatttcagcccttagttgatctttgattccatattttttgtaaccactgtctgtttcctttgctttctcctcctattcttggttgctagcatttaaacatttatgctggcaagagcattttgacattccacacatccccctcgagccagtctcatgctatgtttttcttcaggttgctactctaggtgaaggtgtaaccttagaagccaaacttttaagcaggcaagcatcaatattgaaatttttatccctcacgcctcattgtattttaactttctaattatcattatttgtttcgtttcaccagaaaggaagcagctctgctacaaagggaggttcgtatctttagcaaacatttcatgttagtttggaacttcaatatgcttgtgttttttgtagttatcacaatgcactaaatgccagaaggtagatagaaaaaccccctagagaaaaacaagctagcatgttttcttgcatgtatgcattactagtacagatgtctgctgctattattggtacttatgaagaatatgaagcatgagcacgattttactgcaggctgctttgaaagcagcagaacaaactagtaaacctgaagaggcccttcggttggaagctgaggtatcgacaaattttatgttgtatgtttgtccctcttctttttaaccattcttgaaagattcatgacaaggtgttgtcagtataattcacatttccaagatcatgatttaggttgctaaggatgaggccgcatctgcgattgagcaactccgtgaagttcagtctgaagctaagtcactccaaaatatgacacagcgaatgatactgactcaggaagagatggtttctcttcaaccttgcttcttatcatctcattgtttattcttctgtactcctttatgtcctagtaatgtgatttgcagttttcatcttaggaagaagttgttctaaagaggtgctggcttgcacgatattggatcttgtgtgttaaacatggtaaaaccatttgagcttttggccttttgctattcccatgcttttgaatttttatctaaatctaaacttctgattctgcagactttaagtaagaaacctttctaaaaccaacttgtggattgcaattttttgcaggtattctcgcagagattgctggagcaagatatgagtactggtcatcctttgctcctctacctgttgaagttgtattatccgctggacagagagctaaagatgagaattcatctggtgaggatttgttcaaatatatctatatatttgtttcaaatggtcagtttactcaataaattctgcttgcttcttctggagcagtaaatgatgacgcagaagaaagagagagagttctaaaagaaggaagtgaactttctggagatggaaatattgagagcatgcttctagttgagaaaggcctgcgcgaactggcttcactaaaggtttctgacgcacccttggaagtttccttgctcatattttgtcgaatagcagttgttttctctgttgcttttgctataagctctagtcttagctaagcaaaatcatgttaaaataatgaatgcatatggttcgataattgaagttatcactcgtcaatttcctatcaggttctgtcatgctttatgtcaaagtgatcatccatatatccaaaggttgtaaaatgacactaaaagcagcattgcttgatttcttatggcctcaaatacaacttaataaccagtggaacccctttaggcttttgttcatgaaatgtacagctcttaatcaaagattgctttggatagttaactgttactgtcatttgggcatcaagtatcatttcatgaaaacaagtttgctttaatccaggttattttgcacaatctcctgttgctctacatggtttctagtaggaaaacatgtttaagaaaacatttctgaattaatcaaggaaataatctggctcatctctagacaagttgctattcaaagtgctggtttcttagcagctcttgaatcttccttttcctttcttttcaaggtaggggaagcagtagctcttgtcatggctcagcaacgtcggacgaattttatgaaatcaggtatgaattaattatggcttgcaaattgaatgattttctgcatgaaaatctatattattttagatttttttttcctggtttttcgagttcttgttttttatattttaagattaatttatatctcattgctgatacatgactcaatctgattgcttgatgttcacttgttttctttgatttctcattataatggccgaagatgaaattaaactagccggcgatggaaatcttgaagcatttggtaagtccattgctgaaaacatgatcatgaaagaagtttttctcttacaaaggcttgtagtcttggcactgctattgagtaatatattgtattatactgttgtctaaaattaatcataagaataaattctttcagaattgagccaggaggagtccgaagacgtgcgattcaagcaggtatgatagcatctgcatacaaattagcatgtttcaattgttaaaatatcagagaaagttaagttggagcaaagttagttgacctgagcaatattttttttggttttcttgttttgctggaccaacatgtgatgttcagatctctgaaatgatgataataagtgcgagggcttagtgcttggtagcgtttggatagacggagatagtagagacagagaagacatgtctctgtatacctaaggacaaatttgcaccgaaactatttcagatttctctgtctctccaaccatccttttgtatttgtcccgtttgtcatgagatactaaccgaatgcaatctaatgatctcgagacaatctaataaacgataatactaacataattctgctgccaaacatgtgaaatgaatgtaatctcatcaaattcatacttccattgtatgttctttagcccttcacccttctgattcggtttagggaagaacttgtgttcatgagtcctttctcaaatactcattcggtatccacacacaggcctggcttacatatttctggagaagagccaaaaaccatggtctggaacccgacatagcagaagaacgtttgcaattctggatcaatcacagcagtcggtcttcctcgtcacacgatgcagtcgatggtaatctccctccctctctccttatccgacacacacaggcacgcacacacgcacatgttaaacacaatcatcttccttctccacatcaagtagtctgctagtttcaatcctgaacacgaatgtgtgcattctcattcccgcaatctttcttttaatttacttggttatgattcactccaatgcgcagttgagcgcggactcatggagctcaggaaattaggcattgagaaccagctatggcaagcatctcgaagagggctcgaggttgactccaactccaaggccaatcttgagtccgacttctgatgtaacgttgaagctgttgtctgacacaataatcattgcaattgggaaatctcctctacatgttcatatcagctagctgataattttctttaatgcttcatattgggagctattcatctccaactaccttattcttggctccatacttccactcatgtaaattttctatggcaacgagacataactgtaaccaaatatatttaatttgatacgcacaacgtattctatggcagccacacaaattcaattgccctgaacaaattttgtcataattcaaaatgcaaccatgaactgggaggcttggacctgtggttaaacagaatgcattctttttagggttcatgactcaaatcaagtcaaaatgtgtaaaattcttaaaaacaatgtttttttttaattttttaaattattttgaccatcaacatataaaaatattttaaaaatataaaaaaataattttaaacaaaaaaaattcaaattttaatggaacgtggttcgaatcgcattcccaaacatatgaacggatctcattacaaaaaaactatattatatggtggtaatttgtacaagactaattagtatgctaatgttattaaatttgattagattaatgattcaatttaaaactcgagtaatagattaaaaagcttaatcaaggataatttaaaataatatcattttaaaataaaaaaatttaaaataacaaaaaaatctaaattaaattttaatcgatcaatcaagtttgactataaatttcaccttatctaatttaaaatccaggcatgactaaagagggtattgaattgacttgccgggtttagagtatgtttgaaagtgtgattgcaattgttttttaatgcaaatgcatcaaaataatattttttttatttttaaaaattatttttgacatcatcatatcaaaataattttaaaataaaaaaatatattaatttgaaataaaaaaaaataaaaaaattttaatttttttttaaaacataaaacaacaataagcttaatatcattgcataaagctcgtgcatgagctgggtcatcgaaatcgacagccactagatatggtaaatgatagtcgggccaccttatccttgttttcgataagatattcatgcaaaaatcattctgcaaccgatatatatatatatatatatatatatatatatatatatataataataataagaattaacagagaaaaaacatagataatggagagacatgttcaagatgatgtccaatggaccgactaaaacccagtaggcccatcacatcccaggtgtcaccttactgtaaataaatccattaattttactgtcagcaatgcattcattttcaccacacttgaaaatgacctagagggggccgttggggtaaaaactaaaagaaaggaagtcttaccagactctcatttgtccagtaatgaaccactcccttctataaaaaaggtaaaaaacacctatctcttcactcttcttcactctcaaactcaacaaacaaacatactgtctctccctctctctctaaggggtgctctgaggtaaagcttcaacctttccactctcttctttgatcacattcaagggtcttagttatcatctcgtgatcatttgatctttgatcagaatcttgtgttttttttttggctttgttatgctttgactttttaaagatcagccttttatgatttgtttggtgtgattaactagtagtagcttgatgatcatactagtgttatctcgttttcttatcatatatgctctctttattcacaaagtgttgagtcggtacttggatttggtgttttttgttgttactgcttgtgggttttgtgttttttttttcacagatctctctcaagttttgttcttttaataatatataaaattatctgtaccttgtttgggttttgtagatagaatagacaaaagggcaggagagaaaaataaagttttttaaattaggaattgggtcgataaatgggtattttgtataaattagaactacttaatgatactgaagatgtgctaatttgttttggaatcatcaactttgcgtacttgtagctttgttttgagtagctttgtgggttctttagcttcgattagagtgatttagtaggtatgattgatgtgtactcttgcgcatagaagtttaaattttaatttggctgttttgagctgcgaatcttttggtgggcgttcatgtgcaatgtgccttttatttttttgttcccttgttgtattcggtcaggatgtggtgtttgtgtggttttttttaaagaatttaggtgattgtagatgtgcagtcctaactcttgtctcttttagatcacatagaaca

SEQ ID NO: 106 - DNA, 4006 bp, Poplar sp.
tgtcattatcagctccataaataacaaattacttgaggtgtctatcatatgatatgatgattaaacaaagaaacaagtaaaaaaaatggtagattctcacctaatcatttaatatcttgggataaatttcagtgaactgttttcccttgtagtttttattttataataatattgttactaaggtcgtttttgacaccgtgatacagccaataattattgactagctagcaaagaagaggacttggtatgttatatatttttattgtgtttttctacaactaatcagaagaaatcaattactaatttgacaataaaagcatgcaaccaaaaacgaagtttgaaaattaaaaaaataaaattatgtggattcgtgttccttttccccaaatgttgcaaatgtgtttttttggtataacaaaatcagatacatactagataatatatttttaagatattaagatggtgatatatttgatgacatgtaaatattttttatatatattaaagctttgacatattagattgattcagaaaaatttggattaatcagaaaattcatgaccctgatcatgagacagtgacggagctaaggggaggcaagcaggaatccgggccctgaaaaacattttagatttttttattatttagtatttaaatataacaagtaatatttttttattttaaatagatgggctttctaataataaattattatttcaatagttatctttgactttaaaattatctctccgtgaaaatgaaaaaaaaagagagaaataatgtttctttaccgtaccgtctctctcttttttttctttggagtcctaaccaaaaagtataataatacaaagcggaaaggttaaagcgaagctgtctattaattgttcatcaaaacaaggtaactagtgactcaaatttaatttttttttaatgtttgttgagaatttgatgaggttttttttatatatatataattatgttatttttttttttccagacctactagttttaccatttttttttatttcttgttatattgaatgtctttttatgagtttgtttcaattatgctttgattttttatgttttgtttttagcaaagccacccaaattatcaattttttcttacgtgcatcttactattaccaggtccaatatacaattagacacgatctttctagccaaattgagttctttgaagagtacatacctggctttgaaaagcacatacccagatgaaattaactttataactttgacttaattgggtattgttttaaacctcttactttatacaaagatcatcacatgtttgtggtaagttctttgaataaaactaaatcatgcaggggtttttttacaattcatgtacagtaaattaaaaaaattatatcttgttatattagttttgaccccctgttaaataatccaagcttcacccttgcatgacaccgtgataacatcatatatatagaaagcaaatcaaatcaaaacaaaattagaaagcccaattccaaacagcaagatgatgaaatgcgaaagtaaaaaaaaaaaaagtatattcaattttagaaaaggatccaaaaaagcaactcgagtaaagttaggtaaatatgtcaaaccaacaacccgagtcatgagaacaaaattacttcatagaaaacaaataaaaaaataataaggctacttcttaatcaatctaacgttaaagaaagcaattgaaaaaaaaaattgttttaaaaaaaaaaaaaaacaacccgagtcaacatttcgaatccacaactaaagtcatgaaaccgagataactatataaaaataaaattgagaaaattacatttttttaagttaaaagataaaaaaaattcacataatccaaaaataataattttatttgtgtatgattttttaaaaaaataaactggttgattttatttaagttaaggtttttttttttaaaaaaaagaaggaacgcctttttaaaaggagcacatgagtttaagcttgatggactagctcttttacccaaaatcaaaggcatgttcctctaggccagcccgttaacttattttttttttacttggttggatgaataatacgttgtatgcttgtcttttttttattaaaaaaaataacaaataatgcatcatttaatttgacaaataatatgtcacctttagttccaccaccaacaacattaggtggctgaaaagtcgagctaatgataaatttttctggaaaaaaaattctttttaaatatttatttactgaaaaacacattaaaataaactcatttataggctcaaattagcaaaaaatgagtttaaaaaccaagaattaaccccagttcaaaaacacttctcgatcccatatctattattagtcaagatgaaggctaaatgacacttcattaaaaagagcatgttgcactaaaatcaattattttcgcggttaaaatctatatcaaccgatattttttcttttctcaattagaatccagcaacattatctctcctattttaatcttgaaagctaaaaagtaaaacaaaaaaaaaaacaaagatttagatcaaaagttaactttcaagaaataaagggattgaaaatgtttttattgaaaagtatagagactaaaatgaactttcatgacattttttaaagagcaattttttttcattttggtcccttttgtttaaatgtcatccttccataacaaattagaaacaattggccactacttttataattgaaggacaaaattaaaaaaaaaagtttgataaccaaaaatgaaataaaaatgcaaaaatttcactactccaatccccatagtaaattgtgtgagggagcacaataaattttgctataataaaatgaccacacctcttaattttttgctaatataatataatgttatatagaaatcctaaaataaaattttcaaagtgtgataaaaaaactaattggtttgaagataacatcaaaactcataaaaaaaaaatgattgtctcgccagactctgatttgtctagtaatgaatcacatttttttatagaagcggccagaaacatctatccactcactcttcactctctaacacgacaaacaagcatactctctctttctctctctactctcgaaggggcgctctgaggtaaagcttcaatctttccattttctcctttactttttcttttgatcaaaatcgagggtcttagttattttctcatgatcgtttgatcttgataagaatcttttttgtttttttttttagttttattatgctttgacttcttaaagattagccttttatgatttgtctgatgtgataaaatcatatggctattacgaagttgttggctattatgtgttctttttattcttaaagtgtcaagtctatactcagatttggtttttttggttgtttctgcttgtgggttgtgtgatcttttcacagatctttcttgggttttgttttttaatcaaggcaagctacccaggtattgttagacctcaattttagtgttttctttaagacataacatttacttgatcttgtttagaacttgtagatagaatagtcaaagggcacgagagaaaataaagctgcgtaaattaggagccggatcgaaaaatgggtattttgtgtaaattagagatgcttaatgatactgaaactacactgatttcttatgggatcctcaaatatgtgcatttatagatttatttgattagctttgtgggtcctatatctttaattagtgagatttatttgttataatttatatgtgcttctgcacttatctgaattttagattttaaattggctgttttgagcgtagtcctttctgtgtgtctgtgggtgcaatgtgccttttgttttttctttctcttgttatatttggtcaggtgctattcttgcgagatgcagagtttgtgttgatgtttttaagaatttaggttattgtagatgtccagttttaacacttactcttttagatcacatagaaca

SEQ ID NO: 107 - DNA, 3000 bp, Poplar sp.
ataatattttacctaattttattgcacgctcaaaaaatcatgaaaactatagttcttgtcgaatgaattttgtatgtaatgaaattgtaattttttttaaaaaaaattgagttttactcgaaaaactagtatttaatattatttataacactacttaaattagaaggatatcgcatgatgacgtagcatttgtgaaatttgatcgtcattccaattatattcttgccgggtccaacccagttaaaaaaattcagtttttatttttattttcattgtgttttattcaaaaaattagaaggatatcgtttgatgacgtaacaaaaaattcagtttttgttgttgcatgcttaagaaaccatgaaaaatatagtcattgtttgatagattttgtatgtgatgacattgcatatagtttaatggaataataaaaaatatttgatatcaatattatttatttcatgatgtaataatagtagttaaatcttcaatatttaaattaaaaatattttttaattattttataacctcaatttgaaaagcatttttttaaccaaacacattaaactacttttagttcaacctcaatttcaaccacaattttaaccaagcacctattttttcaaaccaaccttaactaaaaatactttttataaaacaatttttttcaaaccacaatcacaatagcaaccgtaataccaaacatactccgatgagtggtagcgattccattaagttgtcacgtgtatcatggttctcgacggcctggtggtgcttgggttttttcttcccccctcattctctttttatggcattcaggtgtgctttgaccaagcaaaaaaaaaacgtcctcttgttttatttttattttagtcatacttctcattcttttgattagtcctttatcgttttaattttttattattattattttatttatttaaattaattttatttggtttttttattggatttgactttcatttttttagttgttatttttttcttttcaatttcaacccttgagatttaatttgatttgttttttgcattatatttgattattattattttaatagttatttatttttgaatttcatctcttgagattttatttttataccagatttagtcatcgttattttaactatttttttttatatagtttttctaattaacttttgttttttcattttattcctcaatattttttatttctaattttgttctcattcctttaacatttttttttcattttttttaactatttttttttaattttcattcatcaatatctcactgatttgtagtctggatcgtaatattttttttaatatagagatctcggtctcatgcccaagggacaagtgtaagatattaacccgggtcgatattggttttttattacccttttgttttaaactattttttttctcaaatccactcttcaacattgcatttattgaggatttggttcttttatttttcttattttgctttttgtgaagatagttcgacctcatgatctaaatcacaagtttattgtgttggttcagattggttcgagcaatatgcttgagtctcattttatagtccattcatatatttcatgatgagaatctaattagaatattatttgagctatttttattttaaaaaacttatttaattcaagatttttttaccctgatttttaaaattaaccaaacatttcatcatttgtttgttttttatatatttttttacattagacaataaatcctccttctttttttgttgtactttaaaaaaaattaaacttttttattttccaaggtcgcacaccgcctctattttttgtcttttaaataagcaaattgttatttggtatgaaaatatctcatgcatttggtttgcatgtgtttacatgaaaaatggttttttatataaaaaattgttatatctagtaggattatgaattcagattggtggtatagctggttaacttatttttttttagattgattttgtttttatttctagtttttatattcttttttctagtatttgatgggagaaaaaagcagtataaacctgcacaatcatttttttaaataaaaaatttgctataaaaaacgtgtggaataagccatcacattttttttaaaaaaaaagataatataactagtacagtataagttcaactttaacgttgcaagtatcggtctacgtatcccctacattatacaaatcaaacacagtgcactcgcaacaactatagttgtctgtaaaaaaaaacctttataaagaatttacaggttattagaaaatttcaagattttgtagaaataaaataatttcaatattttttttttaaattttaatacttgaaaaaacacgaatgaatgatacaaataattaaaattataaattttaataaatttgcaaatcatattcagagcggcacattaaaaattaatcttagtaacattatcatctctccatctccctcgtataattgattggaagattttttcttatagaatgaaaataatctaagtaaatgataattttttaataatttaaataaaataaattttaaaactatttttaaaaaattcaactaacaaaccaaaccaattcaagacacctcaatcacgattcctatcatgttaacataatgagtggtccaaaaattgttagatggcccaatccctgaaatacaccgtcctatccctcagctaaccatgacgtattaatccatgggcctataagagcatcacaaaactgccaagctgtttcgttaatcctaacatccttttcacttcaatttccaaaaccacccttatcaaatccatctcctccaagcatattcgaaacagattcgaggctaaaacagtaaataaaataaccacagatttatggatccatcaccataagaactccacaaatatcaaacaaaaacccgaaactgaaaacaaaaacaaaaactaaaaatcaaaacccgtcactccacaatctaca

SEQ ID NO: 108 - DNA, 3047 bp, Poplar sp.
ctaactttctcgacttgtcgttttgtaatgacagatagagaggaggtataatttttcttttagatttttttttatttttaatatcagcatgtaaaaattataaaaaaaatatattcttttaagcaaaaaaattaatttaaaaattgaattaagagattgacaattgaaacgttggtgggcagtgggcagtgggcagtgggcactagcactccgttatatatacacatattgataaatagatagatgagaggtaattttaaggggtgtaatttaactgtttaaattttaaatttgttttttagaaattattagttcgagttttatagatttcagagctatttgaggcttacatggtcattaacttcagaatccatgagattaattaaaatacacgaatattgacttgaatattcatattaataataaaaaaaaaacactagagtttgccgagaaaatattgctagaatctctgcatgtgtgaccacagacagtgagccaggcctgaaaaaatcattaaaccatcccataccgtcgtccacgccacctatataacaatcttcaagaatttggtaccatagaaacctaacacagcaaacaagtttgcgagacagtgaagattgactcttgggtagaacttagaatcttgtctagaaaatgagctggtggtgggcaggagctattggagctgccaaggtaattaagattaaaccaaccccatctacaaatcttcagcactttaatatttgaacttgatatttatgttttaacttaacattaatttcatctgttggcaaatgttttgcagaagcaatctgaaaatggagacgcatcacgaggacaccagagcgtggctttagtggtaggagtaactggcattgttggcaacagcttggctgaaatcctaccactctccgacacgcctggtggtccgtggaaagtctacggagtggctcgtcgtccacggccaaactggaacctagaccacccagttgaatacatccaatgtgacatctctaacacggccgacactcaagcaaaactcgcccagctaactgatgttactcacatcttttatgtcacatgggccctccgattcacggaggccgagaacatcgaagctaataacctcatgttccgcaatgtccttcaggctgttatccccaacgcccccaatctcaaacatgtttgcctccaaactggtcttaaacactatgttggtccattcgagttggtaggtaagatcgaaccacatgacactccttacacagaagatctgcccagattaaaggcacccaacttttactacgatttagaagatattttagctgaggaagtggcaacgaaagagggagtgacttggtctgtgcacaggccgcatacaattttcgggttttctccatatagtttgatgaacatgatgggcactctctctgtttacgcagctatatgtaaacatgaagggatgcctttactattccccgggactgaatctgtttggaatgcttattccatcgcctctgatgcagatctgattgctgagcaggaaatttgggcagctgtggatcctaatgcacaaaatgaagcgtttaacatccacaatggagatgtttttaagtggaagcatttgtggaaggttttggctgaacagtttgggatagaaaaatatgggttgcctgagagtgggaagacagtgagcttgacggagttgatgaaggataaaggagcagtgtgggacaaaattgtgaaggacaatcagctgttgcctaacaagttggaggaggtcggggtgtggtggtttgccgattttgtgttgggtgcagagtccattatttcgtgtatgaataagagcaaggagcatgggtttctagggtttagaaattccaagaattccttgatttcgtgggtggataagttgaaggctcacaagatcgtgccttgagtttggtggatttaggtttgctggtctttttgctgctgtcatgttgttttaaaaaataatttggaggattggaggattttcttattgttgatgatttctattaaagcatatctgaattctgaagaaaaaatatttgctggaggtctatttctctttgttcttaattttattagaaaaaactccgactgggctggaattaatattagttaacaacttgtcttggctgcctcccttcgaggtcagggtccagagcccacaagacaggtaacttaaacttacaactcttcctacaatacaatgcgagtcgaattaaaaaaaaaagaataaaaaagcatgtatcaagaaatataattatttgatattttctattttaaattaaattatgtaaaaattattttaatatgactcaatcaaccatagctaaattgttccccctagttaaccaaaaaagtctgaagatatgttaaatcaaataaaaaattgagacaaaaactcgattaattataccaattttgtatgccatgggttactaagtgcatgcaacaaaacccactgagtcataaaatgcacaagttgatggtgttgttggtgcagtcatcagggactaacttgataccaattcgatagatggagggtgtatttgtagattacaattttttgtttgcctgattttgtattatggaaaggtagaaaattggtatttttgcttctaatcatccgagtcagcagagtgtcgtgcacaagttgtcgaatgaaagtttggttgatatgatatagaaaacaaaaggaaaaaaattacaatcaaagggatttttttaacagtaaaaactcatttcctttagttttttttttttaatttaacaagctcaatcaaattacatactaatcctctaaattaatgttaaatttaattaaaattaaaaatcgaatcacgtttcttatcattacttttgtcggataatcccgacaggcaagctttactagaaaactctatctagttgtcacgtatgtcatggctcgcgtcacatagctcttgttttcacgcgagaaccaattttaatagggcgattctgaatcaaaacatatccagaagcagcagcaagttaac

SEQ ID NO: 109 - DNA, 3127 bp, Poplar sp.
cgtggacatgtgccaaacacaaaagaccactccacaaaaaaagtggattagtgtgtaattcataaataaatatcttggaaatgcaatcatcggcaacactaaaccgacaatctgtccactcaagtaacgcatccacgacgtcaaagagcgatttatcaccttaaactattgcctctcaccacacatgaaccgtaccacaaacctgctagtcgcaaatctcgagatacccttccctttctcagtttcttgccgacgaaaccgccctgaggtcccacccaactcggggtactttttccgatgacgaggaacgacgcccagacccttcgtacggttaaatcctgaatacttacataggattcttataattactgtttaaaaaatggattacgctccgtggttggcggtttgtcttcagatttgtgcagttaaattttttaaattaatattttttatttttttcatttaaaactaaaaaatatatattattttaatatatttttttaaaaaaatactatgaaaaatactttataccatgattttaaccacctccagactatatatatgaaaatacttgattaattaatacacattttaattttatattgattttactagaaaatattttttaaaattttaattaaaaaaatataatttataaatttatttttaaaaattataattataaaaaaataccacggtatcaactaaggcaggtaatccaaaaaaggcaaggctacaaaaaagtcggattttataggtcaagatagatttttataccctaaccctgccaattaactagtttgtaagtgattctgctggtcactgaggtagaaatgctaccgaataagaggcccagtgcacatgacccctctgaaagtttaaaatgatgaccaaaatttaatagttattttatataaattttattttttataaaaagtcctttttagtaaaaaaaatagtatattttagttaaaaatctataattattgtatatatatattttttatgtgtaaatgatttttgtatcttaatatacccccctgcttctataaccttgaattcccagttcctcccgtgtagatctttcaaatcatgaatactagatatctatacaaattgatatgttaatttaattaattttataaaatccaagcccgccattctttacttcttctactaatttgtttataaaatatatgtttcaatatctcttgataactcagtaatccaataattaatctaattagtaagttaatagttctagaccaaaatgaattaaacgaatagataattttgtgtgataagaatatattttcccataaatcttctaatcttaatataaataatccgtttctaaaattaaatttagtagccattccatgtatattactagagaaaacaataaaatatctgaggttgctttgctgcttatttgaacaacgaacacctctcctgtttatttctttcactcttgccttttttttaatctcaccctctcgtattttttttatttgatcattttcacaataaattgatttgcttttcagttttataatttgttttactttactttacatggagctcttgacatgttgaaaaaaacttttaatgctcggttgataatcaactagacacatttaaaataaatgaatctttataaggcaaatttgaatctaaaataaatgttcaatcattttttttttgaaaccagtgactagatttaacgaacttgaaaaaaaaattaatcatatgtagcacatgcaccaataacttagaaatgacataatattgtgacgacaattgcaacgactaccaagctcgagatgcgcccttacatggtgccaacaaaatcatcacggtgaggagtttattatctaatggctcattgagacaagggctctccggtgttttttcttttttctttttttttcctctcttgttgagttttgcgtttaactctgttgttttttatatatatatatatatatatgttaaatttgatttttattcatttgattgttatttttaacaatcaaatgaataaaaatcatgtaagggcgcatcttagtttgatagtttcattgttttttttttttaatttgatcctcttatattagcctaatctagaagtaggtttgatagtttattctagttgactttaaattgggttattgcaatatcaattataaattttaacattgaattaatactaactaacaaaataaaattgaacttttattgattcaaaaccattaaaagtttaaaattttaattttaaaatgaaacaaatattcaatatttgttttcaagaaataacatcttttcctcagcttttcaactggatatttaattaaaacaaatagatttattatcatttgttaatatataattattggtttattttattaaacccaaatataaactttttaacttgcattataatttttctcaataataataataaaaacgtttacagcacctatattttatttacgttgagaaaaaaaaaatcccaccccacactcaacacacacaaaaaaaatctgctgtggccccgagatacaccgcccccactttcatatttatccaatcgaggccgacaccacgggtctcactcaaggacagccattcacgttctcgttccacgtgtcgccaaggcatttgcagaacattacagcgtacccctctcaacttttctacttccttccctcctttcagactgctactttacacattcctccgcgtattgaacacgcttatgcctccaccactcccatgagttccatctctaattactagacatctagccaatcattcaagcgagtacatataattctatacatgtcggaagtaatacgttttgatttcctcccttacttaaatttacacgtcggttacagaagtgaaacctgactggcccagctcacttggctttattacttcttaatcgcgtcagctccgcgttggcttccagctataaaagcccatcacccttgctaacccaaacccaaacccaaaccatcagttacaagcgcaaatcactcgaagcagaagcttactcattttaattactctgttgtgattttgatcttttcttcattaggttcatattgtgattttgatcagt

SEQ ID NO: 110 - DNA, 3067 bp, Poplar sp.
ctagtatagatttaacccgtgaaaatttcaatttataacatgagttcatgaaaatattataaattttaaatcaaaatccaaatttaaattaatgaaatattaaagaccttaaatgaaaaaaaatatattaaataaaaaaaataactctagcaaatctagaaaggtgtcttgcttcaaccattaaagtaggaagaaaaattcaaaacttgggtaattagcttgaatggatccattaagtcgagttaatttaataatataattaaaaaataacaataaataataaataaaaagacccaagataacccatattattttcaaaatgagtgaaattatatagaaaaaaaaaaaacaagcctaatcttcaaataaatcaaatgttgacggataaaacctaaaaaccatgagcttaaaaaaaaaatgacttaataccttatactacgttgcgagttaaatatttttttttctaaacttaaaaaatgttaaaatgaatgaagatagtgacatactagatatatttttaaaaatgcatattgagcaattactttaatttaattcaaaaaaattcttctagaacaatctaaatataataaagaaaaaaaaataaaaagactttagataacccaaattatttctaaaagcaatgaaaaactttgtacaaagaaaaaaaaattgtatagcccaatgttcaattaaattaattgctaaatgatgaaattagaaaacatgagaatttgtttttaaaaaaacaacaacaaataaacccgaatgattctcctaaacccaggctaatcaaattaccaatcacccctaggaccaccaataattacaaaaaaaaccaatatgaaaataccaacatgcccctaaagcaaagcctgtgacttttttaattctaagagcaataaagtagttacttgaacggttgatgtgaaatgttgtaagagcagtatggaaaccaaggaagaaagggaaaaaaaaagccaatcgcaaccaaacttttaagaattaagtcacacgtgccatatggagagatagcccttgcaattgtgaataagaaaacactaaggaaattgatttttacttgccaagagccaccacatacgccttttgaaaatgacaaagtgacgcactcgttggtgctttccatgaacgcgccaataacttttttttttatttgtttaccaatcaaattactaaatcattcctaggaccatgtgataattacataaaataaatcaatatgaaaatgccaacatgcctctaaagcaaagcctatgactatttaatagcaacaaagtagttacttgaaggattgatgtgaaatgttacaaggacagcatggaaatcgaggaaaaaagggaaaaaaatgacgaaggaaactgatttttacttgccgagagccaccacatacgccttttgaaaatgatgaagtgacgcactcgttggtgctttccatgaacgcgccaataacttttttattattatttgtttaccaatcaaattactaaatcactcctaggaccacgtgataattgcataaaaaaaaaatcaatatgaaaatgccaacatgcctctaaagcaaagcctatgactatttaatagcaacaaagtagttacttgaaggattgatgtgaaatgttacaagggcagcatgaaaatcgagaaaaaaagagaaaaaaaaaatagcgccaaacctaaagcaaagcatatgactttttaatttcaagagcaataaagtagttacttgaagggttgatgtgaactgtggcaagggtgatatggaaatcgaggaagaaagggaaaaataaaataaaaaaaagttagtaactgccaaaccttcgagaattaagtcacacgtgctgcatggagaggtaacccttgccgttgtgaattagaagacactaaaaaagctgatgtgtacgtgttgtgagccaccacacgcaccgtttgaaaacgatagagtggcgtgctcattggcgaattccatgaatgtgccaacaactttttattattattattatttgtttattaatcaaataatctaatcacccttaagaccacccgataattacaaaaaaccaatatgaaaataccaacatgcccctcaagcaaagtcaatgactttttaattccaaaagcaatagattagttacactatgcatgtcaaaatgaaattccaaaaagcccctaaatcatagttattttttttttgcttttaaagataatcaagtaatttaattgtacaaaaatttataaaaatactgagataccctaaacaattataaaataacaaacaaacctagcaaaaatatcattttactcctcaggcattcttgagtttttttttgaaaggaaaaaacactaattactcatacgaaatagtttattttaatttttttttatgtgttatacttttttttattgcggacaaaattcgattctctcttttttgtttttaactatccctaaaagcattaaaataatgttattttattagaagtgtgattttgattgtttttcaaagtacttttcactaaagaatgcatcaaaataatgtttttttattttttaaaaattatttttgacatcgtcacatcaaaatgatctgaaaatatatataaaaaattaatttaaaacaaaaaaataataatttttttaaaatttttttaaatttttttaaaacataaaaacaaatttgtcctagtctcaatctaaccttagccaaattataatctaaccttagccaaattatctatagtaatggttttttttttgggtaatggttccttatagtaaaaaccatttgagtcaaacctccaaaatgacataaatcacaactaagccatacgtaaaaataaccatcctggcttgcatgaacaccaccacctcttaggctcttgccacctcataccacctaaactaaatcaaatacaaaccccaaaacagtaatttcccacttctcctcctccctttataagctccccacaagaccgtcctctctttgccagccacgaagccaccaccaccctctgcgaagtgcaaacccattccttgcccccctccctcgaac

SEQ ID NO: 111 - DNA, 3089 bp, Poplar sp.
atatatgtgatgactgaatcagaaaggggtttgagtactgatttaggatgttctactggaatgtaggataagcatacaaagtgggacccgacttctcacgtgcaagtataacaggagttcaaggtaagggttgctcccttacttctttaaattgtttaaattcttgtaatgctagttatatgatagacattatgcgtattttttactactgtgtatcatgagaaatattgctatgtgaacattgcctacgggcagtaaaaatattgttgcgtgaaaattaccaacaagtaggagaaatattattattgtgggaacattaccaatgagcaagaaatctttttacaatgtgaatgttacctacgggcagggaaacaaataccaattctatgtgaatgttgcttacaagcaggagaaataatattattatatgaatatgtccacctggtgaatatgactaaagaaaggaaagatacggtgaaatgaacatgatttgaaatctgaattttggtctagactttgggattcagagtttagataggggtctatattgtgtgtgtgtgtgtaaatgaccgcctatgaacttgattagccgacctcgaataggggcggctaatgatattaacaaatattgttaacatcggcatgaccttgaaggaaatataatgaatattgaacttgattatctatttatatcatgaatagttaatgatactgacaattaatgtttttatcggcaaacccataataacttgattaacttcctaagaaggaaagtaaatggtgtcaagagaacttggcatcgacatttccggaaatatctccaagtgatggagagcaattgattgaccattcgggttggaaatagctcaatggtatcgattgattaagttggtgccgacattgctaaggaattgattagtctatcacggtaagggtgactaatgacactaataggagttattagtgtcgacagcgactgcctcagaatttggggcgggtaagaaaaatgataaattagacaaaagttaatgtgtgataattgaaaagaaaactataagtaggttgtggaaaaataggcgttagatgtagtaaatgatcttcttttgcgaatcaactatgattatgccttatcgagtgagtacatatatgcgtagttacacgtagtggtgaccctccattatctggttgtattttatttattttatataattattcttttattttgatgttgcaggtctttctcatttccattaggagtagtgtcttaggtgtctagttcttttgtatgaattaaagaattaacatttccaatccttttgtatgacttagggttagcatccttatttcttctgtgtgaacctgagatgaaatggatgttgttgtattttctttacataattatattatgggaacgatgtcagtgttcctttatcttaatcataaagacctttagaattttatgcttgtaatattaatgttattaatcaaatttattactattagtttgtgttgtaaattatatgttcgaaatgaatccctggatttgcaaaatattatgattaataataattgtggtcgcaatgcaatatggatatatgttgattatggaatgaacatgagatatgtataggatgagttgttggtaacttgggacctcctagtatagggagactctaccgaaatttcagtaaaaattttgttacagtgtaaaataaataaataaaaaaactcatatttttacgtaccaaattgtacgaaattaattttaaatgcttacgaaatcgtcgggtgttacattcaatttcattcttcaatcccaatttgtgatatattttttttaatttgatacttgttattttgatttctaatttcttttcttgactattttgtacaatttttattttttttaatttaatcttccaattcaaaattatgatatattattatttttcaatttgatccttgtttttttgaattttttgtctttttgtttacaatttctaagctgattttttcttattttctatttttttgggttttgtttccttattttttatgattttattctattgtgttagctctttatatatatttttttcaatttcactcctacttttttttaatctataaataatttatcaaattacaaatatttttcaatatcatttcttatgatttttttaatctttcaagtttagtacccattctttttaattgctatttattttgtttgagattgtttttatttttttttcaagtttcatcatccttatatttttttctctcagactttatcctcattctttttatcgttgtttttttttgttgcctttacaagtttttatattattttttttcaacaatttcatcctttaaaattaaatcgattaagagctaagctttgagttcatgatttaacaagtggcaagttttagagattagatcaggtttaggaggttcgtctggatttgcttgttttttttttaagcttattctttttttattttttgagttttgctttgattttttttctatagtttatcttttattaggttagtattgtgttattttataatctcacgtatggttttttttttttgttaatttatttatttttgctatatttttatttttatattatttaaaatatcgattggatgaataaattgaaactttaaatgtttttaccctaacattttttttttatattaaaaaaaatggctcagcccgcgggcaacacgcggccgacaaatctagttattatagtcaaacctccaaaactcataaatcacttgaccttcgcaaaagacataaagaacaccactctttgctaaaaaagccttcctctatgtggcagcatgaacaccacctctcctctctatctagattctagccacctcataccacctaaataaatccataaccccaaaactgtaattttctataacctcacccactcctcttccctttttaaacccaacaagatcctcctctccccttgccactccccagcccaccttcttcttctgcccccccgaacgccagttcctctctctctctctctctctctctctctctatatccctcca

SEQ ID NO: 112 - DNA, 3204 bp, Poplar sp.
gaaagaacatcaaatgaggtcataattaactctaaattaaccctaaacaaaaccactaacaaattacgaccatgtttggtggtatctcaaggtgctgttagaatcatctcgttgagatctttttaatggtgccgaatgtgtcgaaaacaaagctttggtgtgtcccagtgacccattttggatattcataaaattttgagttgatttttatgcatgttaattatatagcgagggacatggtttttggaaaaactgttattcccaataatagttgtgttcaatcgctattctcaacagcagttatgttcaaactatgttatttttctaataattttccaacatgtgttacttttccaaatatcttatgaaattatgttagaattctagaataccccttggctctcctgttttccttttgataatcagaaaatactagttatttgactcgcactccattgcgaatcggatatttgttttctacaaaaaattaaacatgttggctttttcaaaatgttttttttatatatataaaatataaagtatacataaaaaagttaatgcatgcatctaattaaataaattgagaactatttgtgttaataaatgaaaaaaaagtcattaacgataactaaatacatatctagaaaagtcaagaggcgaatgtagatcaagatatttaatctcataacatgatatatttacccaattatattcaattactttatttattaaattaatttttttttatctaatcaaatgatagtagaaatagacacacacatataattgattaaataaaatcaaagaaaaaaatatctcacaaggttgcactcattagaaataccatccaaaaataaatattttttatctttaaaaataaatttcaattatataaaatataaaaattcatagatgaattaaaataattgcttcaaaaattaaatacaaacaaaataataataaaaacaaccactatttaaaaaaaactaaataaaaaaaataaaaaattagagagaagggggtattaatttaaatataaattttaaaaaaactattttaaaaaaattataaaggcatgtttttcttaaaaaagaaaggcaaaaaaaaaaaaaagaaaaagaaaaagaagaaaaaggccaagcgctacaaggcttggctcatctagaaagggcctatgtgttgaccctttttttaaaaaaaaaattgtcgtttgccctattttttttttaaaaaaagagaggcaaacaacacatcatttgatatttctcaaatttcagccactatggtgcccgaaagaaacaaggtctatattttttagacataaaaatttattttcaacctatttttgacttaaaacacatagaaaagaatttaaatacctttatagccccataaattgccataaaaaaaaactaaaaagaccacgcaaaaactcgaaatcaacttgaaatcaaaatctttttatgtcttttttcattttttttttatgattctttttcttctctttaaagctcaatgactaaaaggtgaaccaaactaaaaaggataaaaaagaatattgaaaaaattataaggcaaaagtcaaaactagcaaaaaggcaccaatgccaatttttattttaaaaaaaagctcccactttttctttatttcaattttggctctttttttttttttattaacaataaattggatttagtttaagataaaaatgactttatacaaagtagattgaaacccataaattccaatcaacacaacatcgaaaggtaaaattaaaaaaaaaaattaatgacctataacaaaaaaaaaaaaggatcagagttgacacaatagttttaaaaaaaacaaaatggccgctattttttttatttcaattttgatccttccatttttaatttttttgatataataaaatccaatttgttttttgtaaaatcgagcattaacatgacgttggagtttttttgagatcctaataaccataaaaaaaacaaatcaaaacaaaccatcaacaccatatcaaagcatggaattgaaaataaagattttgatgattggaaaaaaaaatcaaaatgaaaaagaaaaagaaaaaaaatatttcaatctatagtattttgtatatgagaaaacttttgttttcccacatcttttatgttattgttaattttaatattaaatttaaactctttcaactcttcttttttctatatctttttgaagatctccaataaggcttgatatctgtaaactgtaaagaacaaaatatgtctatcaatgaaaaaaaattaattttgcaagttcttcattaagtgtatagttcatcagtcagtaataagaataaaaattcataataataactaaaaatagaaatatttaatttgtgattaaattagaaacaaaatgttgtgattgtttttttacctcatgaaagtcttttttacctttgtaaatgttgtgattgattaaattagaaatagttaattgtttttttaccttcgtaaatgaaagttttaaaaggcataatacttataagtaaatcaataaaattgaaatttttcaagaagcaaccaatcacaacatgagtctatgtttgtgctagagttttaataaattttgaatttttttgttttaatttttttatattttttaattattttaatgtcctgaaatcaaaaataaattttttaaaaataaaataaatataattttaatacattttaaaataaaaaataatttaaaaaataaatataagcaacattatgctcaaaatgcaatcataattaaatctcttaaaatatgactcatttttcaagtattcaagttcaaaataagttattttagatttttttttattatccttaaaatttaaataagagacagtaacacgggaataacaacaaatgcgggactccacagtaaggacacttatcttcttcttcttcttcttttaaaaaaaaaaaacaaaattagaaaagaaaataaatgcttgagcttaatctaaacccaaggaaaaatccaacggccaagattgggtttaagaagaagtgggtgtctcagactcaatgtctttctctatctatatcaaggaaggcataaaatagaagtgttggtgtcctcttgtgtcttcagagtcatcgtcctctttcacctgttcttcttttttctgcttgagagtgaatcgatccaagcctaactaaatcatc

SEQ ID NO: 113 - DNA, 3185 bp, Poplar sp.
cctgcaaaatgtgaaggataaagtgcataatcatttcatttacgattgctggttgtggtcatttaccttatcccttcatttatttgtatttcagattgttcaaaacggccaaaccattttcacactgtggcgtccatatttttatgtcctgacatagtgcaccgcattcttgagcaagtgtagcggatttatctccttggcttctttactgaaggtttggtaattctccttgcagagaaatccaaagctaatcatggtgtaatgcttgtaacattaaaatctagagctgatgatttgtgactgagagagaagagtgatttgtgactgtaaaatgattgagtttagaatttagacacagcgggtgcttttttattaaactatgtaaaaattcgttgtatctgtaacagataccagtcgataaaatggttcttttgtccagctttaattcgataccttttggtcattcagctgaattgtgggtgctaacttgtaagacctttttcgactcttcgctttttctctccctgttttcgaatggactcagatactgggaaagaatgatttgttttatgtgaggcgaagagtgaaacgaaatggctgttagttgtgttcggaaaggtttgaagttccaattttagtactcagcagtgcttacggttgtgatttagagtgttaacatttttttaaaatatattaaaataatatattttttatttttttaaatacttttttatattaatacatcaaaacaatatgaaaatataaaaaaaataaatttttataaaatattatttgaaacgtaaatttcaaccataaactaagtcttatgggaaaattattgtagctcaagagaaaaataactatttattacaatagtaagttgaaatagtgaagtgacaagtttggtcttctcaccatgaaacacaaagctttttattagagatgagttatttatttaattgggggtagcttggtattttcttatcttatggtgcattgaaattacttatatgctttaaaagcaaattttttttaacttgggtctagatgctcgttggactttttatttttataagcatattgtataagtatattgtaatgactatgtagtttttagaattttgtttttcaaagaaatctacttcatcttggtttttttcataattttcatgtagttttatgagcaaattagtatttttatcatttttctactctctttgcctcgattagtgtaatgctcctaaaaaatagcaataatccttcaatttattttttttcttgagattttagtctttattttaattgcaatttttttattttaattaattatttcaaattaaaaattatttttaatttcattctcttttaatttttttaatttcttatatttaattctctcttttgattgctaatttttataggtgatttttcaagttgatatttttatttttttttgcaatttcattcaccatctttttttttcctatgaagtttgatccacatttttttattgttgtttttgcaaattttttgaacatattttttttatttcattcttcaatattaaatttattgagaattgaacctctttattgaactcggtatatgatttcacacattgtaattttagaagattaatccaggtgtaaaagattcatccgagtttgcatagtttctcgtaccactaaattagagttgtctttttttatattattaaaataattgagcttgtcaaatcagttgacttgatgatttgagtttataatttttttctcgatttaatccttcaacgttaaattagttacgagttgagattttttgttaaactcaagtctaagatttcacgggttttgaatttagaaaattaaaccatgattggaagatttacttgagtttgcgtggtttttcatgttattaaatcaggattgtctttttttacatgttattgaattaaatgatcttatgaaacacaagcgactcaatggtttgatttttggattttcttgacttgtttggaaacacttacattaccttgactttcttttttttatattcggttaaaattcttctagcctatgaggtagcgccaaccaccaatctaggtttatttgcgtcatttttttttgtttttttagatttaatttattcttctcattttttactttcaatatttagttcatcataattgacctttatgatttgtgtataggttttatagggttatcacattctcctgccttgaattacaggttttgcaagttaactatggttggtcgaagtcaatttaatgcgttatcatcttaatatatatattttaaaaaacaatatgtcaatatttaagtactttaaaaggttttttttttatgtagcatgtatcaaatttttaagttcatgatatttttatatctttttaaaagattttaaaaaaattatcagagatctatattttgcgggtaaaaaaaactagctaagttttaaagttcaacctcttaaaacactattaataagataaaaatatataaattaacaaggtttataaatttgtcaattaaaatgttattattttttatattaaaaaaaaaaagcgtacatgcattgccgtgtgataatttaatcataccgggttggtaatctcgctttaggataaaaagacttgaaaattatattttgatgaatttagcaaacttaaaaattttgtataatgcggactagtgtccgtacaaaaacaaattaccactttttaaatcaaatcccataataataataatataaaaaaaaatgtattgaagtaaaaaattataagaaatttgaattttaaaaacttttcgataatcaaacaaatctcagtaacaataacaaatgcaaacacctcaacccatcccaaacagtactaccccaagcacaccgtactaactgtcaatcagttaaatccaatggttcaaaatatcccatttttaactgttaatctcttaaatcaacggtacaaacttgcccgaaatcactgctatcattgaaaaaaaaaatcacaactttagaaaccctaaaaaccttctactcatctaaaaatgcatcccctataaatagcacaaattgataaatcagttgctcttcacactatctccctatcctttctctatcggtattttgtttgttttgtgattgcaactctcttatcaatcgcggcc

SEQ ID NO: 114 - DNA, 3115 bp, Poplar sp.
atctcatacatgattggactcaacttatatgtgatgaatcctcctttgcaggaatcaagtaagagcatccagacagaagcctttcatgttttcaaggtacaatttaaagaaagaaattgtgaatgtttcctctttgattctttaacttcatgtgcttttttctttcctctcttattgatttcccccccctgtactgcagctttttgttgcaaaccaaaataaacctcccgacatagttagtatacttgttgcaaatagaagcaagcttcttcgtttgttagctgatttcaagatagataaaggtataaaaacgtaatacatgtctagtgaaattatgctggcttcagcactgtattgacatttttttttttttttttgcagaggatgaacaatttgaggcagacaaagctcaaattgtgaaagaaatagctgcccttgaacctagagagtagccatgagtgtgcctggtttcttgtaatcattttacataatttacagctctcataccctgatgacaatatcagtatccaacgaatatatgttaaaactgtatattcttgtgcgaagggaagagataaataaaaagacatgaattgagttcaatccaatacttggctttgaagattgttttaatgggtggcaaaagaaccctgtaagagaaggagttcatgttttatcaacctcttagcttcaccatctgttcatccctcccccttctcttgtagacaaaagtcacaaggacagcacaaaaagaattgtggaaatgaactttaaacttgcaatttatttatttcaaaatagaactaatgaagtctgaggtttacaagaccacctatatgtatgccagaaaacaacagtttgaaatttgaaagcacaaaggaaattgaaacaaatagtaacatttgggcttgatttctaattttgggatattcaacggttcaacatgcaatatggtggctttctattagaacattactggtagaattacttgaatttttttttgttttaagctgctaatttagtttggcacgattataccttttcttgtacctggatttattttattggtcaataaaaatatttgttatactattaatatagtttattttagtcagatttctatcaagttgtgttagattctcatttcagaacctttaatttttaggtggactgcatcatctttgtaacaacttctggttcctactgtatttttatgcatttagaagatctcaccacttctatgctaaccattaaccaaacttaacttagggtatctttgctaatggagatagaagtattttcactgtgggagttaatagctatagatgtctgtggtcagactcaaacctaatctcatggaaggagagtaagcagctagcaaatgttcatgtgctaaaggatgctaaaaaagcacatcgctatgctatttccaccctcaagattatcatggtggcagtggtggtcaaggacagagctagaaattttggggaattagagaaaagtttaggaggaccaaaatttaaatttttttatttttaagactaaaaatctaatttattgaagaagggaggctagggaaaaaatattttcttgcgaaggcctctgtccttgcagccccctagtggtggtgactggagatggtacaaggtacatgaaccttccacaattatgggttttcataattatgattgacatcggagtcaccggtgaacgtcaccaaacactgcaagcacaagcatattccaagcatctacttccattcaaaagcagaatgttctctgctttgactgttagtctgttactagcactcttcgttgtcataaaaaggagatgcaaaaaagagtataagacaatggggtgttttcattttggaaaatctacgactacaccctccaattattgtgtaggtttcaatttggtccttctccttctaatctcatcaatattgaaattgtgcaatccctcttcctcattaattggatgttaattttcccataaattgcctgcaaaaatcaagttttccaattcatatcaaaattcctcattcttaaccttccaatttaattgccttaatttatgcttagcaagtgacaccaaattaactatcattcatgtttattatgtgacttcgaaaatttctatcatttaacatacaactatttttttaataatgaaattaaataataaatgtttgtgaatataattagaaggttaaaatggattaaattagaagtaaattaatacacaaattagcatctaatttaacaaaacaaatcaccatccaattaacaaaaaaaaaaaaacaatttggataagttagggtatcatcgctacaatcacaaaaagaagaaccagaccgatacctatccaagaaatgaagagtatattaatagtttgcccataaataaaagggttgaaaagactcaagagaaatcattgaaggacttagtttatttttcacctggactttgctgcaagaagcattgttttaaaatgggattggcccgggttgattcaagactgtactgactcaggtttagagctgctaaagttgaaaaaaaaacttatttgatctagttaaaaactcaattaatctaataacccggttaatctaggcccgactcattcaaaaatcagtaggttgatcgagaccttactaactcaagtctagacctgttcaagttgaaaaaaaatagaaaaagataaaaactagttttgttgacccttgtaattcaataaactcgagtcaaaccaattcaaaactcaatcatcaacccgttaaccttttctttttcaaaaaaaccaggtttttttttttaattcataacccaagtgttatcccccgattaacaggttttaaaactatggcaacaaggacgctactacactggaaatccaatcaaagcagaaaaagaaaggcagattcctcaccataaaacgtgctatataaaaagaggaaaaaaaaaaacagaaaccaaacggtcctttctgtggctggctgctgcttccttatgtacgtaaaaagacacatagcctttcatcattttcatcattatcaccacaataattgacctccctctgccattctcttctttgtgcattcaaatttataaac

SEQ ID NO: 115 - DNA, 1726 bp, Poplar sp.
cccaatccccaataaatgaaatgccggaggataaaatcaaggaaaaaaagtgatcacataaaaggactaaaaaaatagtaataaaaagaatgagaataaaaataaaaaaaaaataaggcagagggcagctacaattttttaatcagatggtgaaatgaaaaagaaaattaactttaatgaaaggggaaaaaaatcaataacaagtaacaaattgaaaaagtaatacaccataaatttggattgaaagatgaaattaaaaactaataaaacttttacaaaagagttacagaaaaaaataaaaaatcaaaagaataaaaatcaaattgaaaaaaaataacatatgaaaaaataggatcgaaggataaaattaaaaataaataaaacttttataaaaggatcaaacataaaaatcaaaaataaaaaaaagaaggattgaagttgaaatatcaagaacaaagaaaaccaacctgtaattttaagagaagaaaagagagaaaaaaaaaaaaccccattgataataaatcatctaatcaccattgacatgtgtagtattaacaaaaaaaaaaaaaaaaaaaaacaacaacaaaaactcatccatcaacatgtaaaaaaaagacatttttccactgggaggagtcgcaaaaaaaagtgaatgataaaatatgtcaataaccataatgaatttatcttttgttttagttgttttgttattttggaattatgccggaaggctcgtggaagcaaaactaatattttactatatacgatataaaaatctgatactaaataaaaagtaaggtgcacgataatcaatataatcatttgaataaaaaatatattaggtcaaaaaagaaagaaaaaaagctgatatcacgctaactattaattaatctggagatctaaaattatctcttatgaaggattccttgtaattttaattattttctcttttatttttaagtttaaattacctcaattaattttggactttggatcaaattgaacttaacctttgatatttgagtatcattaagtaattaaagttaaaaataatttctattaatgtagccatttttaattactgaaaatcacccctctattctcgttatttcttattttatactagccattctcaatttcacccctcctttgcccttactttttagtttttacatgtcttttatgtcatccttttctcttaaatgataatattcaacaaaaaagtattaggattttaaaaattaattcacttgccaacagcaacgtggcgcttctagggaacatgatgagggttggttctgaacaagtctaaactacaggggtcaaaaggtaacatgtctaaatatatgagatggaaatttagcttaccattataagaatcacataatgggcctcgccttcgtaaggtgggctctataacgctgaaccccttaaaccactagagcccacgtttcactgcctttaaaacccccctctccctctcgtttccaaaccctagagattattttgtgttgcagcagcgcagccagagattagaagcaaccagcctcagatcttatttccacaaggtaaacaaacttttcttccggaacactgtttgtttatagatagctggatgcaatcgttctattttttttttctttttgcgtttaaatcgttgattgctgaaactttgtctactgatttcttattttttctttgatttttttttaatggttaaagaaag

SEQ ID NO: 116 - DNA, 3035 bp, Poplar sp.
tagtcgtgacaagaaaagaccactggctcaaaggacacagacttctatgagtgctcttaaagaaacagaacatactctcatgttgatgtgtgtgcactagctaaacattggaggtgatgggttaaggtcatgaaagaaatggattcagagctgctggagaaaagtattcatctattagcctttattagtccaggaactcatcgcgttggagaatcttccagaggagttagaattctgcaagaaaccatcatttttaaaaagcaggaatggattgttttctcttccacctctctgttgtgctcaaagcccatgtcttctgctttctcagtcatcactactgctactgtaggcaagggccattcaactaaattaccaatccagtttcttcagacttggttgccctacatatttataggatctcttttcttctcttgaaatacctctgtatggaaacagagggcgctgctaaaagatcagaggaagtggggtttgctgatctaactcagattcctgagctgccaatgccggagatattgcatggcttgcaggtaaaaagtgctaagtgctcctgtattatcatcgacttcagtcctctcattgaagggatgtaaacggtttgagatcatgaaattgagggattacttttgtaatagtgacacttctctgagtaaaagttttcaccattggcagtaaatgaagtttcaccatctatgagagatttctgtgttgcttttgatgtgaaaatactctatgcttttgatgcctgtactgacttgttatattttaaaatgcaggatcaggcagttgctgttgttccggaactttgtggttctaacaaatcaaggtacatcaatcctgaaatccagtcagtctgtctcttactactacagataatggagatggccctatatttggagttctgcgttttacagatttgtggaagaagccctgtattagggcgtgtggaggaattttcgaaggaagcaaaatagttgtcaaaaggtaacagccctttcatactgctaactatattctgaattaatattttagatttactattataattgcctttgcttttttttttttgtaagccatggaagtccatgcattctttaaagcatcagtcacatccttgaaacatttaacatctcttgtctatcccgtattgttacagaccgaaggttttaggcgaacttagttgggtgagtaacagatcatgaaaatcctgtacagatatcagaattaagcatggccaagatatttgcatgattacaacgtaaaactctgtataacatcaacatgtgacaatatcagaaccatacatcattgattatcgcttggattttcatggttcctctagctcagtgaaggaatatcacacaaatataatgaagatggtgccaaatatcatcgatctggcgttgtttcgcagtcatcctctttccatgattttaaggtgccctgttacaagatatgccttcccaagggattttaattatttctcgatcatgcaccgatgctgccttccagcaagggattataattatttctcgatcatgcaccgactgctgtaatgatgtagggaaatgaatttttctagggggactgaattttcacttttgtgcttgaatgggccctgccccctttgcatgcgtgatgccacaaggtagcatgtttttgtggtgagacaattgttgaaaaaaaaacaactgcatattattgcagctcttgacaagacatgtatctttgtctctctttttatgtaggaggtaatgctattcatccaggaacaggtctcaagtaattagttactccaatagtatctatcaatcatgcgttgtcatgtagaatttcccttcattgattccagatcgatatccatgtcaccaaaaatcatcttgaaaaattaatctggtatttatgattttagtggcagggaagtttttttgaatttttttagattttttttatgattttatataatttttgatgtgttgatgtcaaaaataaattaaaaatatataaaatattattttaatatatttttttaattttttttgaaattgcactaaatgctgtcagtttttctttttatagttacaaacattctatttccagatgactgtactaaaaaaaacataccgttattattgatatattaaaataatatttttttattttttataataaagttgaggaatttcaaagagattttgctggcgtgtcaagcatattatcaagtattttttttttttttaattatcatccaactacggtagtgggcttagtaaatgaacgggttccttaacggtagtgggctcccctaccacgtcacagctgtcagttaccacgtttattcaataatttattaatgtttttttttatttgcttagcatcgaatagttgtttggaactgccgtttaaatatattttttaaaaagtttttatttttttatttttaaattggtttgatgttttaatattaaaaataaattttaaaaaataaaaaaaatattttaatatatttttttaaaagaaaataagcttccgatgcaccggagaaaacttggtcaccgacgattagatcattaatgcataaatatgatattcatcgttgacattcactagaaaacaaaatcaataaggccacctgattactggtgtttttcaagataaaatccaatcaaatcactgacaaacattaatcatggcgcatgaaatttgtacgattttacctatccctcataaatctcgccgtatccgaacaaaaccacttccaaacgacgccgtctctccacggtgataataaagccaaaaggcatataccacttaggatcccttacttaaccctagtcaaagcaagcctgaccacagttaatcccaaaccaccgcgatccttccacgtgtcctgatctagtgatccaaatccaccctctcgccctataaagtcacccccaaaacacccggaaaccctatcaaaacaactctcgtttaatccttctcggaaatcaaatccctaatctctctcctttaca

SEQ ID NO: 117 - DNA, 3062 bp, Poplar sp.
cagttcttcttacaccgatattctggacaacgtgataccttatgttttttcagagaaagctgatctgatttcttattatctcagtgcacctgactttccatctgatagtcatgacaagaaaagaccacgggcgaaaaagacagagacttctcttagtgctctaaaagaaacagagcatactctcatgttgatgtgtgcgctagctagacattggaggtcatgggttaaggtcatgaaagaaatggattcagagctgcgggagaaaagtattcatttattagcctttattagccgaggaactcatcgctttggagaatcttccagcagaactgcccccctcttatgcgctcctatccttaaagaggagttagagtgctgcaagaaaccatcatttctaaacagcaggaatggatggtttgctctttcacctctctgttgtgtgtcaaagcccaagtcttctgctttctcagccaacagtagtgcatttgtagtcaagggacagtcaactgaaattaccaatccagtttctccaacatatttttcagacttggttgccctggagatctacaggattgcttttcttctcttgaaatatctctctatggaagcagaaggtgctgctaaaaggtccgaggaaatgggatttgttgatcttgctaagattcctgagctgccgatgccagagctattgcatggcttgcaggtaaaattgtgctcagtgctcttatattatcttcgagtccactcctctcattgaagggatgtgaatggtttgagataattcaagttcagggcttacttttgcaatagtgactgctggtacttctgggccaaaatttctagtcttccaaaattgaagtttcaccatcaatgagtgatttctatgtctcaattgatgtataaatctgtctaaactctatgcttttgatacctggtctgacttgttatgatttaaaatgcaggatcaagcagttgctattgtttctgaactgtgtggttcaaacaaatcaaagcacatgaatcctgaaatcaaatcagtctgtctcttactactacaaataatggagatggccctgtatttggagctctgcgttttacagatttgtggcataagacctgtattaggtcgcgtggaggatttttcaaaggaagtgaaattgttattaaaaggtaatagccccatcatgctgccaaccatcgttcaaatttaatctctagatttactataattgccttattttattttttgcagccatggaagggcatacgttcataaaagcatcagtgacatccttgaaacacataatatctcttgtctatcctggattgttgttacagaccgaaggtttcctgtgaagcacttgtggaagaataggtaaacttagttgggttggtgacggattatgaaaattgtgtacagatatcagattttggcatgcccaagatttttgtaagattagaaagaaaattctgcaagccattattaacttgtgtacaatatcggaaccatacagcgtcgattatcacctagattttcatggtccctcgatttcagctgaggaatatcacgcaaaaaacatgaaaatggtcccaaatatcatgaatcttgctttgtcctgtagtcatcttccttttgtgatttaaaggtatcatgttgcacgatatgcactgttgtaatcacgtggggaaatggattgatctaggggactgttttttctcttttgtgcttggaagggacccgccccctttgcatgcgtgatgcctcgaagtagaatgtattttcggcgagtcaattgctgtaaatacaaagcttttgattatactgtcttcgaaaaaattacagaaatttattatgtcttgtcaaatatgtttctgtctgctactaaagcaactagaattcctgagaagaaatgtgtctttttttcttttttatatgccgatggtaatgctattcatactgggaatgatggtcgcagtgattggtttcattttttatttagaaatatattaaaataatattttaaaaaattaattttaatattaatatattaaaataatttaaatatatagaaaaattaaatttactcaacttttatttacaacgaaataataacaaatggggagtctggcgcaaactgatatccttcagaccagatttctgccactggcttctttgtaatttcacaaaaaaaaaaaaaaaaaaaagggccacttgcattgtctcgtgtaacaaatgtttcttagaagcttctacttttgaaaaaggtggcattatttttttttgtttaggtaaatacagtatcccttaacaatagtatggttaggttgaatgtcgacaggttcctcagtgctagtaggccaccctgcctaattatagctttcagttaccatgtttattgaatatttcaatactttattgacatgattttgatttgtttaacattaagatggaggtagtgtttattgaatataaagtattttgtatatatgttaaagaaaacactaaaaataataatttaaatctgtaaaaaatatatatatatattattcaaccacactcccgtgatttaatcacctaccattaggatcattaatgcacaatctaatcttactgggatttgaaatcaaaatcaatgagactaccttaaacaatctccaccgttagattatctcagatttctctccatcaattcacggtccaccattaatcatggcccatcatgcacgaaatttgtacaatttacctatcccctcataaatcctaacgaagacttgccatatccaaacgaaaccacaggccccaccaaacggcgccgtttctacacggcgcaaataaagccaaacagcacatgccacttaggatccctcacttaaccctagtcaaaacaaacctaaccacagttgaagtccgaccacctcgatccctccacgtgtcctgatctaacgatctaaatccaccttctctccccataaaaacacccccatatcactaaaaatcctaaacaaatcaccctcgacttcatctcacttagaaggctaatccctaatttctctctttcata

SEQ ID NO: 118 - DNA, 3093 bp, Poplar sp.
aaaaattgataaaaattgttttttttataatttcacccttttattttaagttgtttaataattgagtttcataattttatttaatttacttttacacggggatattctgttatcacagtctaatcacatatttgacgtgctaacccggatggattcgagttgagtttttttttattgtaattttttttattttatttaccatcattatatttttttattcttgatattaaattattcgagtttattaaatccaatcgagttaatgacttatttgaattgacctgcaatatagcgaagatcacctatccagcacaagttaataaaatgaagggaaaaacaattttaccatgatttaaaattaaaattgttgtttaaaaacgagaggggcttgttttagcacattgaatgaaaatactaaacgaacatctgtaaatttgatggaatttttaactgtgattgaaagtgaatgaatgaagtgattatattttagacaaaatcgataaaataataagttttaaaactcaattgataacggataacattaagttaatttcggctgatctgtcaaaatcatagggataattttgaaaaaaataaaatgaaaagctcaattgattaaatatttaagaaaaaaaggtaaaaaatagcactgaattaaataaaaactaagtgaactcgagtcaactaaataaactcacaatgcaagtcatgcacgtcatcagatgcaataagttttttatatcataaattatttttcatttaattgtatgacgataaagcacatggaaatttttttgcctgaaacaatttttttaaaggaaaaaaattgtgataatcatttataacaaatgataaaattatatatttttttagtttcgagctagataaaaaaatagatcattgataataaaagatgaatttgtatttttttaaatcaaggaacagaaaaagacattaaataaaaaaaaacaaagaaaaacaaatagtaactcgaatgcctcatattaactcattaaactcgcgatccagttcattaactcaattaggttcaatgatttatcttatcaattttaacccaaatataaaatagaaaaactttaaaaattaaaaagaaaaaaaaaggagcccaggcacgtgggcctggtggcccaacgtgcataggtattaaaaaatcatctcagcctgcgtgcctcgaccttaatttttttaatttttatttttattttttaaggaagcagatgacttgtcgccagttttaattttgttgttgttgaaataaaacaatagatgatacatcgtttgttttctatagaatccgtgattggaggtcactagaaaaatggggcattgatttttttttgtcttagaaaattattttcaacccattttgactgaaaaataccctaaataccttaataaatttatacgtggctttaaaaaaaccttaaaaaattctcatgttagatccgcctcctccggcaaggagaaaaaaaaaaaaccatctaggtaaaactcttcttataaaatagaaaccattgacaacgatttcaagttttcaatcatctttataaccaaaatcttcgtcaacgataattttctctatcttcatgggaatccgacggtcctctctcttctcttaaaaaatagattgaaaattgaggggaatgaactttgattgtaaaattaaaattatgacaactaaagggattgatcatctataaactaaaaaacatgaggggtcaaaataaattttttatatgaaatttgaagccatcacttatttagttattttaaccggtcattttcattttgatcctttgtttttcaatccaatcatctctttaaaaatatataattatgtgctaatttgaactaaaaaaacttaattgcacaaaaataaagtttaaggactaataaaaaataatttacgagagagtaaacaaagcatctccaacagataaaacaccacacgttcttagtttttgtcaatgtaatgggcgagcaaggtttcatcactcgtaaatgatggcatcatttagaagaattaattttttgtcaataataataaaaattggcaaatgaacacaaattattattattattttttgaaaaatagcactcactttggtaatttagaagaattaatgtccaaagaacagagaggaaaagaacacgagacaaactaggaagcttccttagcacatgccttgtcttcagaatctgtcagataaggagggaaacaggagcgtgtgaactcgaaaaagaaagtgatggatcatggacatgttcctcccttcttggataaaaatttaccctatcaagctaaacgacatcgtgtcttgtccatccattttctgcacatctctcttttcatcctaccaatagggatatggaaactggtcctcacgtgttcgatttttttattttcatatcacatctattatttactggataataaatttaaatattcataaattatttatccgtttagttataggaattcaataaatatatattatttaataaaaaataaaataatatttttttatatttttacatctttttgatgtactgatataaaaaataataaaaatattattttaatgcatttctaaacagaaaaacactttaaatccaatcaccatcataatttcaaacacacctttagtgttgacgtggcattgcccataacataatcatattgcctagctcaactttatttgaatatttttgtaaataaataattaaaaatttatagtacaaaaaatcgattatcctcctacataataagaaaaaaaaaatggtaagaaacaacagaaaatcaaaatatagaaacaaataaaggaagaaaatgtgggctagtctgggctgggcttgagaaaacccatcaaacaatttcaaaccggaccagccgatagggctcgagaaaaacctatttcttaacgttaacatattttagggtttgggggcttcttttaacactctattctactgaaagctgccgctgttatataaacaaaaaaattattttcttagggtttgtggccttggagagatactagagttgaacagagctgctactgctcaggaacc

SEQ ID NO: 119 - DNA, 3064 bp, Poplar sp.
taggatccacaagaaccagatgtagacaatgaagaagagaagaataaaacctgcagagaagagttgttaccatgctaaggtcaaacattaaaaattcacataaaggcacaaaaacaagctctcctgttgattgttcagatacgttgtttgaggttaaagggtgatgatcatggtacctggacataacaatatcttcagaaagcgagttgttgattgctaaggcatccatcactttcctaagcacctaatcaacaaccacaaaacttaagacactcatttgtacacagacaatcaacaaggcataggaatacacctacctcaatcgtagattgccaaacatcagcagaaagagaagaccccactttttcaaacacttcaccaagcatagtaaacataacagtataaacctcccataaactactatacttagacactccctttccagtagccccagcagacctttggttcccactactgtacgacgagctaactaactgtgcatgagagcagtcaacaattcggagaaggaatttcactaactgaacattatccgatagcaaacatttttgctgatattcactcacaaaatacctacaaattttaaaaaaaaataaaaataaataaataaatgaaaaacatataaaaatttagcaatcaccaaatgaaaaactaaccttacagtctctatacattcgacagcaagactaacattagcagtaccagcttttccgaaaaagaattgcagcattttcgcatacgaatcaagtgcaacactccatgaattagaatttaattgcagcgaaacgcgttgcctttggcatacatcataaacctaatttacaagattcaaattcagtaaaaaaaaactcactaacactaacaaaaattaaaaatttaaattatttttaccaaatgtgaaatgtgagggtacactgaagtgaaatcttgtgatgaatttgccaccaattccagtaaaaatatcaaatcagaggtaatctgatcaaacaaaatgattagtaagttaatgcaagagtaatttaggagtaaatcagttgattagtgaggattgagattgataagttacttcgtgagaagggagatcggaggcggcggggagaagagtgggagaggagaagactaaatcgtgaaggagttgtggaagtgattttgattctgattttggacttcgagttgttagggtttcgtctcttagagtgagaaatgctgttctccaggttcggattatcggcggcggcggcggcggcggcggcggcggcggcggcggcggcataaaagcagaaatgatttgtgggcggggaagaggagctgggagtgtttatagcatttcttgtgatgatttaatttaaatgagtgctagtgttttagaacttgtgaattgaggtggcactctattacagcaaatatgattaaaaatttgatttcttgaaaattaattagaaatcatatttaaaattgaaaagtaaaatataaaacaaatattgattttaagattaaagataatcttaatttaaggttgtttggaaatgagattgtttttcaaaatatttttgtttataaaatatatgaaaattatttttattttatttttaaaaattacatttaagtttagctcaataaaattaaatatttagatatttaaaaaaaatagttataacaagatttcgataaaccgcactcctaaaattaattagcctccaatttattatttgattatcaattgaatatcaaacttgtgatttattaattttgttacaataataaaagatatttagtttttttaaaaaaaaactataaactcacgagaacttcaaatgcaaatgaattttctcgggagaattaagatttcgtttatttttgcgtttaaaatgtgtttttaaaaaaaaaattaatttttttatttttttactttaaattaatattttttggtgtttttagatcattttgatatgctgatatcaaaaatatttttttactttaaattaataaatttttttttttacaaattaggttttataggtccacacacatgttttgggggtgaaaatagatagcatttagtttttttatcaaaaatattaaatcttgattttttatcatctaagacaagtttgatagcttaaaattgaaccaagtgacatcgcatcactggataaacagaaaatatatagtcacttataatttaaaaatatatacaaatgatatgtcatttatttaatttatatatataattataaatatatgcatagtctgtcagaccagacatgtgtgtttttataaaccatgctatttttaaaactttataatgtattaacatgatagctcctctaaaacctttgtagtgaagacaattattttatgaaggttatcataaattctcaaaaatattctggagttttatatatttaattttcaccaatacctcaaacaacataaataaaattataaaaggataacaaaactaaattagtattgatatctaatttttcttatgcaaaagtttcatgaataagtcgtgattaatgttttttatcacgagttgcatcattatcacatcaaaatgaaaaaaatagtcaatataattataaaaggggtaacttgtctgattaaattttaaatttactttctaaagattactagctcgagtcctataaattttaagatcactgaagacttatatggtcatttatttaagggcttgtgagattagtcgaattacatgccagctaaaataatcaatgtttttattatttttattaataataataaaaaaagcaatctatatgttaaaattctaaaaagagaacatcaacgacatgaacaaataaattaaactaaataaaaaatgtttgaatatcaataatgaaaggcagtaaatgtgagccgggcttgtacggccttgggttggatctaaaccatcaccaaacaggcctggtcatctccacacagccttaataattatagggtttataaagaaaatatgtctagggttttggggcaaccctgaaacacagagagcagactagagagacggctgccacaaacc

SEQ ID NO: 120 - DNA, 3010 bp, Poplar sp.
ctagtacaaagagtaaagccttaagattatagatccaaagtttgtagatatgtataatagactagtgagcagaaatatttaatttatcgtcacaaaggcatgttaaataaaagatggcggataaaagcctagagtttatacatatttaaaactatagggatgtaaaagcataactaaaaacaaatgtgctttcaacacaaaaataataatataactttagcatgcatactaagcatatattcaaacttgtaatatatataagaccgaagtcctaacatgcatactaataataaaaataataatttttaaattaaaataaaaatggtacttacttgttaaaacaccttaaattaatgaatcttttattgttgtcaatgatgaatcatttgtccttaaggctttattgttcttcacttgtgcaactagaatgtttgcaatatgtcttccaagattccaacaacattatattggtttaaaagcacttctaaacaaggtcttcgaaccaaagattatgtaacttaatatctctcaacaagatgaacctaagcgctagattttagagaaaaaaaagcataaaaaggaataaaaacactaaaaatgaggtaagaaaaagtgtggaaaaatataaaaaatacaagttaaaaactctttctttatcctttttttatagtgaattttgaaagttaaaatattaaagaattaattattgatggatcgatgtatttcatactgaaaacctttttttttctcataaaacccatgactagaagggaccaagagaaataagatccattatataagctcacagagcccaaagccgtgtagcaagaaggtctggcaaaatgccaggcccaacacccattaggcataagtcgcacgactcctttgggtctggcgagatatcagacctaaccctttaggcccggctacgcactgtgctcaagcgcctgcgggtctagcgagatgttagacccaacctcattgggctcaactacacccccggtccaagctcttgtgggtttatagagatttcagacccaacccccctgggcttggatatgtactagagccaagatgctagaattaacacctttttaagccaataattcctccgaatatgagcacctaaggtgagaatctagggtcctcatctccttccacattttctatgcaaaaattcctctaagggtaatccatacgtcaatcagtattaatattaattaaagggttgatcccatcaatattaatattgtgtacatattgatatatgatcgttttttatagacacgtgatactcccatcaataattaatgtaacgtaaggagatacttacaatcaatattaatgttaactgtaagggtcttccctcccccacttggatatgaagaaggaaaagatttgagtaagaaaaaagaaaattcaaggttatgaatattctctgaacgacttagaaaagaggtttgtcatcttcactcttttagaacttattcttagcatttatcatacataaactaagaacatatttttttgttcttagaatttaatgcttatttattacaactcctcgtaataaagttactgacttaatcatcagagggtctctaaaatccttaaaagatactgttttataggaaatccagccattgtcaccaacccctgaaatcctcagttacagagaatagaagatgaacataaacacgtgatcattcatcatccaaacacggtgaaaaataggttcttgacattctagattttagacccataatttatttatttaaaacaagtttccaacatcttcattgcaatcccgggtatagtaaacatgagttctgttcctcgtatcgaaaacggcatgaccaaaactggcctcacgatttgctgagtgatatggccgtggacgtgccaagctgcatcaccagatcaatacattacatttaacaggcatatatctatatgaatcttgatttatatttgttggttcaatcgaggaatttgcataggaagaaaagcctaaaagaaaaggaaaaaaatcaatgatctatttacttgtttaccaggcctccgagatgccctccatcactaatggacaatggcggtgtaacacaggagccgattgattctttttttacagagcaatctccgtttgtaatgttgtatgcaatgtcgaacaaaaacaggctccaagctactgccatggactccccttccgcgtagcgagagcatattaccttccacagaatgctacgagcaaaacaacattcagccatggcgtctataaactttggtacgtagctccttgtcaagcctttgtgtgttgttaatgcttttttaaaattaatttttaattaaaattaagaaaaaaggttttcataagaagttatagcaaaggagcccaaagacaacatgtaagcaaacattcagcccagcccactaaaactttcccctgtactaatgggcctctgtagcccattttcacacactttccaacaagtagcagaaacagaaataacttcccagtcggaaaccgccagtccaagaagaagaacctaccattcaaaagtcaaacggttcacctctaccacgtgtccttctcctattgcctcttcctttcctttctcccaaagcaacaaaaggcccatacccaccgttacgactgttagataagctccacccaccccctattttactaccattcatggtccttaaagtttcgactcctggcgacattaagccctttactttatagaggagccttctctatgactttctagaatctaggtgatttcttgtgggaaaataacctaaggaagagagacaaattggactaaataataaaaatttattcttgaaggatgatatatgtaattataggtataaataaccacgcaatccattcgtatatttatacctataataaataatgataataataataataaaaaaaaaaaaaacgaaaacgaatcttttttctatataaaatctctctctcggtgagtgtttgccctcattt

SEQ ID NO: 121 - DNA, 3020 bp, Poplar sp.
ttcgttatatttcatcaatttaaccttggaaggattggattttaaacaatttagtctactatacaaggtatgttcatcacggtgtattaaaaatccggtttgatttggttgatttgatgaaatatgacgaatataagacaagattgatgaattgtttattgaagggcctgatctgctgaattgaaacaaatacagggactaaactgtgtattttcatttgagataatcttatttccactctcatttatggcttgtggtccacacgcagaaccaagggcagagaaggcacacagaatggacagccactagcgtgaattggtgaaaaaaggtgcgccggcagtggaccagcatggtccgttgacttcctgacgttaaaacgactggactacgttcatcagactcctccatgccacgaataccaccccacctagccagtgcttactgccttctttatgcctacctctctcgagtttttttttttaaaaaattaatcatttaaatattttttttttgaaaaaatagcacagtgtatagaatatacagataactatgacagtttagttcagagagtagcaatcgaatttctcaaattgtaaaatgatcttatataatttataataaataaaaaaatatctaactccaatgatgatattatcaatattattaaaaaaaacttcaatgatataaatttaataacgttaaaaatatttaaaaaaatcattaatgatggagaaagaaaattatatgtattattcaaagctagtaaaatttatttacttttaagtaattaatgtggtccattttaatcattatcgataatttttttttatattattaaatttattttatcaaaatctttataataattaataccagaatcatcatgatcggaacttcttattcctttttctccgtgaagccaactttactctctatgacagtatcatgtttatgtacgggctctcaacgttttaaacgatgaaaggacaagccaattattccttcctcttcaaaatctgtttctttgtcgaatgtttcccatgtaagaaacgtaacatgtataaccgatatataagttagcaactaagacacataattaaaaccagtggtgcacgtttggtaaaacccaccgaataaacgtaagcccttcaaaaattgtctcaacccctgttcggagaaaaccaagaacatgaagcttttgggttttaaaacagctcgtgaatatacacatatcatgacataaaaatgttcacagagacttgtgcaatagcgttttttattcttcttctacttttgtgcagtactgagaaacaacagcgagcttcaagttgcgggagcaaaagtaaacaaaaataactatgaccatacattattataccataccagtactacgtacgtacaggctacattattaggaggggagtgaatacatagagtactgtgcacggggagcatggtaacctggaggaacttggaaaacatgactatggagagccatatcaacgccctttttcactgccctaatgaaactgcttgttttgcctccgctacacggcaatgccatatcctaaactagaagaaacaatgaagaagaagaagaagagcccggtacacccatcttggtctgcttccctcgcttcaccactttaatttattagagcccagtaaccatttttagctcattaggctgcatttctgctgttcttaaatatatcttatcagcccttttattgtaatctaaaccaaaggcccaacagccataccgagctcttcgaggttcaggccgcgcatttcggatgttcataaaaactttggccctgacactgtaatccagagtaagtccccaaggttctaaacccagtgaacaatttaactatattaagtaacatgtgatttgagtaaagtattactaaattccagcaccatactcttttgatgatgtctcatgcagtaaatgcaatagctcctcgtattgtttcaagcttgagtctagagaaagttcaattttttttttattgtaaatacaggtgtgggtattttatcttagttcttgatcaagaattaaacataattagagtagaccaaggttgatgtcattatacatcaactaaacaaatcttaaaggctaatcgataattaacaaggattatcctatttcataattcaatcaatttaaacttggaggccagcatttatgaacaattaagaatatttacatacaaaaaagcttaaccttgattgaaattaaaatacatccacgagtacctttattgtaaaaaacaaaattatataaaacacgtgtaaacaaaacccagcccagcccatatcagcgactttcctgggccaaaagcccattcccaaactccacgacaaacacactttttatacccaaatatatccaggacgtaactgaagaaacatagattagcttcccaccaaaaagccgaacctaccattcaatccagcactccactgctaccacgtgtccttctgctattgcccatccgctgccctttctccttaagcaaactcaaaaggcaaaacccacgctaccgtctgttagctttaaagcaccgcccatctccctctctacgtatattagtacaatcgtatttagtatttataccatatgatttggaaccaaaaccatccatggtccttaaagtttcaatatatacccatggatcaaaataattcaataataaaagaggtaaaatcaagaactggcccaatccatcgccgatcttactcctttaaagtctcaataaattaactacaattatccgccgtagggcccaccctataaaattaaaagtagagggtcgaatttgatctaatctaaactagagacacggatattgatacacgagggatgatataatgaatccacgtaatctgtatcccaatccgtatcggattcgtatattatacgtctaacaataaccaacaaacaagtatatttttctataaaaacctctcctttgccaaggcatcgccattacctgattttcaatccaaca

SEQ ID NO: 122 - DNA, 3038 bp, Poplar sp.
acttaaacttattatgaaattgtttacacgagtatttattcaagtgtgtccgcaaattactagtgttacaagtctttgaagcacatgcataattttattaatagtactcgatcgcatgtagctctcctcgacaatggatcgtaatcctctctatatattatatcaaattgatgctaaacttcagatataaatataattataaaggccacgttccttttcatgttaccttttctgggcaataacacttgcatgagtagctgaaacaagcctggtctctattctagcatcatcatcatttgttgaaggtcgaacttcgtcattcgatggatgagcacttcgttgatcaacattaatttcttgaatggaattgaagaacttgtattcttcatcctgaacaataagatttaatcaattttagttaaatatttatacaaaaaaagacgtaataattactagttcggagctaagtctaagcttattaattttgcagaaaatgcaaaaagaaaaaaaaaaagagcagtcaaacaacaaaactgagattgaccagagtattgtgaaggttaacttgtcaaaatcaagctagggtttctggtcatgtaaatctctagctaacttcaaagcttttgctgcttcacaatggacgaggatgggacacatgcacacacaactttacgccgtaatctcgtggatccatgcctttgttttgtggatgtagcatgaaatatattttcaagacgataacgtttttgttagtggtgattaattttttttcggtttagtttttataaaaaaaaaaaattaaactaaaatttttttaaaaaaactaaaaccgaaccgaaatcgggtcaaaccgaccggtttcggttcagttctatttttttagggtagaaaccggtttgactcggttttttccggttttggcttggttttttcggtttagctcagttttggcttggtttttccggtttggctcaattttttttgagttttggttttttcatatattttttttcaattttctcggttttttagtttttttgctcacttgtagtttatgtgtgagagttctctttgtattttcatttttattattgtgaatacaaatctgaaatacatacaaatttaactatcccaaacaatcggcgaagacggatctataacaagtgcaaatggggccgcccaaaactgagaacaattcataaagcttgatggattttttgttctctccgcaaacatgttggagtttatctaattccaaagagataatgagtaaattaaatgatgaacattgtaatcataaaaagaagaagaaggaaagatataattataaataaacttcccagcataatcattgatattgatttggtagttaattaagaaaatatttcttgactttttaaaattaaatctcttctaaaccattgtataatctgagggtgtgttatatattaaaatcatcttattctggttaatataaaatgatccgaaaatacttttatagtaaaaaaaattgttaaaattttgcaatatcttgattcaaccatgtataacaaaacatgattacaatttttgcttgatctttccttgaattgctctggttggataacattaatttcgtgttttgaaattctcaatagcatctctagaacatggattcacggtgacaaaaaaataaaaaaatcaaaattgaaacctggaaaaaatattacaatcacatgaattcaccagcaacgacaacacaagaagggaaccggtaacttgttagcggctgtttgacaaacatacttgtccatgtatttaagtatgttttaagagtaatctatattaaaaagcattaaattaatatatatttttagtgttttttaatagttttgatgctgataataaaataaaaatatataaaataatattttaatatatttttaaataaaaaaatatttataaaaaacaacatcatagtatcaaacagatattaatatcaaacaaacattttattttttttggtgtgtttgagattaaggtgcggtttgatttttgtagaagaactcataaaaaaaaaaaaaaaacatgtatttctaacttttaggaagatataatttatactttaaatgattgtacttacaaaagaaattaatcacactccaccatatctcaatttcaaaaatatacttgggcaatgtttgatattagttattttttaaaatatttattatttaaaaatatattaaaataatatttttttatttttaaaattttacttttaatattaatacaccatatcaattaaaaaatataaaaaattattattttttaaaaacaagcacaaactttccttcttcccctttctctactagaatcgtcacagcttacgtatgtttccctgaccctaataaataataataaatatctttgaaaattagtaaataaatattaataacggtcactattgcgggcccaagcacgaaaaagacaagcatcaaagaaacacaagcaacagaatcaaaggcccactcagtccgagaccatggagtgcacgcttatttggaaaactcaattagccgagcattaataacgatcaccttcacttcacaaaagccaaaaagtcaatttattacgatggagaggattgtgatcgaggcaaggatggcgtagctcctatttttaaatattttaaaaaatatattcgatttcaaaattattttctagtatatcaaaataatcttaaactatatataaaaaataatcttaaacatttttttaaaattttttcagtaaacaccattcaaacggcgcctaaccaatatatatatatatatatatatatatatatatatatatatatatatatatatatatttatttatttatttatttattttttctttctgtttcttaatccatcaacttgctcacgtaactatacgtgtcacgttcacagtggtaatcaccacacaatattctgggaacatcgccgcttacaaatatctcctacgcttccagttcccactgcacaggcatttctgtcccaagtccaaacc

SEQ ID NO: 123 - DNA, 1129 bp, Poplar sp.
agacaatgatgtgcaaataaatttgatgtactgctcgagcgaaagcctcggaggcgaaattaaggttgtgtgatggatatttcacaaggagcattgtactaatttcatcaactccactcattactatgcttcgaatttgtagatagatgcgaatcaatgtcacaaactataaacccaatgaaccttataagaggacacgttttttcttctccatataacatggagccatgtgcctttctatttcttcaagtacacttcacaagtgttctgtggcctagtatttcacgaaccgcatcgctctttctttagcgcttcaatcatcaatggctgcaaatttatactttctttaattaccatcatggttataaaattcaatgcagaaggattctatcgatgtgacacttaggttatagatcatagggttaataaatcttttttttttaaataataaattaaaatgagatattcttgattaattctatactgaatttttaattgaatcaaactgagttaatattctatattatgagttgcgcaaatctaaaacgactgtagggctggtccatattttagaactggactgtatctaaggcaaaccaaagaacgaattaatacaaatataattccccccaaaacttgagactacaaaaaatggggtccaaaacattataacgtgacttggtaagaatggggtccaaaaggtgacccaaaatgaaataaaaaattcgggagaaaaaagggaagaaataaagaagaccggaaataaccgttgtgggcttgactttgggttgatgccaggctgaccccttgagtcctaccctacacgatagctaacccctcacccatagaaaagagaagatgattagccatcacatggcctatctgcacacctggtcccacccccattttctctctctaggctctcccaggtacaacagcaaaaccctaaaatacccctgtcttatccaagatatgcaacccacctctccctgctttaaaatgactgaccacctagggcacttacagagacaccgtcgcaaaccagtagctagagagatagagagaggaggaaaggcttgtggcaagagagctaattaactgtaaagacagagaaactccttagatcaaa

SEQ ID NO: 124 - DNA, 3102 bp, Poplar sp.
tgatgcttggtttgtgcttttgtaacaactgcccatgtataaaatcaatctgttgttcatgtattaattatcccacgaatcaatcggctggtggtggccggattatgcatgatgtcatcgcaaaatcaaatcttgcttttgatattgcaagaaccaccgtagcaaaccacatttatgatgataccaggctaatcaaaactctctctctcttcctcgttgctttcgttggctacgtgggcaacaagctaactggctggctgggccacagaaatgccaccattatatttcaaaaaaattaaaaatgaagcgaccgttgggggcgtcgggatcttgagaagggtagacaagtccctctccttcacattccccaacggctataagattgtaagaaggctctggaacaatctagccgttttgggataccggacacgtgtcgtggctagaatggtgatgatatgtacaagtgaattgagtcgtttgatacaaaatgtctggtccttttcttttgtttggcatttatttattattcaatagaatattacgttagcattttattttcccaactaaataaatgttcgggacagttaatggtgtgtgtttaaggcgatgttgtaaactcggaatgttcttgtaggctgactcgtggtcaaaattgatctggttaaaataataataataaaaaaaaatcttgactggcttaattaaaaaactagattaacttactaattccatcaaaaaaaaaaattttattaagatagtgacttgagtttgtgtttcctaataaaatcaaatcatatctcacataaaaagaattaatttaaattgactcgagttaactcatttaaaaaaaaatcaaataaaattatttttataaaaaaaatcaataaatttttaatcaggttttatccaaatcacaagtcaattcaggttttttattaagttaaactaagctaatattttctattttttcttcggccccggactggtctaaacaggtttttcaacatgggagttacatcacaagattaaatgtacatttcaaattattatgactcagtgaaatcaaaatgaagcgagggagggagggagggaggagataagactgcattccggcgagtgcttgtgatggcgtcatttaaaatactgcctttgataggtaaggagaggcccatcaaaaacaccactacccacagcaaagccacttcggcaatcattctacctcataaaggacttatctttttatcctctcttttccttttggattaataaataatgaaaagaaacacccttcttctacaatttacacgtactgattgcactaagcatttgttttgtttttagaaaatgacattaggctttttttgtttggtaaacttagtcatggaatatcaaaaattatatgaaaatacctataaaacaaaaaagattaagcatatttttatcaaaattattcaaataacggtgcacataccctaggaaactttactttttttatcatacgaaaaaaaattatacttttattgcatgtagaattttattatcatgtcatttttttcgacattgcagtattcctgaaatttaaattgggactttatttattattgtgaccatgattgtttttaaatgtattttttatttgaaaatatatcaaaataatttttttatttgtttttaaatatatttttaatatcaacgtatcaaaacgatatgaatacataaaaaaattaatttaaagtaaaaaaaataaaataaattttgttttaaaaccgtttttaaaacagaacaaacgagatcgaagtcattcttcacatataagatttgagacaaatcatttatacatggactggcttgttcacatggtttttttccacaacctctacttgaatccaaatttgagacaaaagacgtgaaaccaactactctttaccatagatagagccttcagaattgaagggttgtgtaattgatacttgatcgatgattaacgttgttctaatttcattacctatttttctaacccaagcatcattgtcgttcaaatatttgtatagatgggaattattgtcacaaatataaccctaatggatcataaaagaggactcgtttgttcttctccatatactatggagccatgttccttcctgcatttcaagcacgttcatggcagaaattaatgctgatggggcgcctaatgtgttcatggactgcatttcacactttcatagcatttctatggcagcaaatctataaccatttgaggcaaagacatactctaattctcactaccgaactaattaactacacccaatgcaaaataaacaacgaaccaatacaaatataagttcggtttggtttcatagattgatccgaaagatttagtatcctaaaacttaatctgggttaggtttttaattgacgtaatcaagttattagtaacacacggttaagacagttaaatctggttaaatcaacatcaagaaaaaccttataattaattcaatgatatgggatttaatctgatagcctaacaatcatttttcctttcaaatcagccctccaatcgtgtacaataatcatgtccaaaacattataccgtgactgtgtaagaactgggtccagaagggtgtgcgaaatgaagacaagctggggactggagaaaaataaaacgaaaataagagtttcaagttcgagagaaaaagcaaggaacgaaagaggacaagagatgaccgttggtcgcgtggctttggttggatgccaggctgacccattgagtccccatagctaaaccttctcaccctgtataaaaaaggagatgatgagccatcacatggcctatctgtacaactggtcccacccctgtttcctctctctacaacccatcctctctgtctctctaccctctcctaggtccagcagcaaacattgttttgttcccaaaaggcccctgtcttatccagaacacgcaacattttcatacccttctcttccttctttaaaaggactgaccaccttaggccactcacacagttacaagccgagagagacgcaaaagcttgtgacaagagaattaattgtaccgagaaagatctttagatcaaaaaa

SEQ ID NO: 125 - DNA, 2221 bp, Poplar sp.
caattctaattaggtagatggaaaaacaacgttgttaaatgaaaaaacatgctgatttctagtcttccccaagccatctttagcgttggttttcaccattaaatcagcccccaatcaaactgaaatctcatgatcatagtcctgttttattcctataaaaaaaacaaagatcgagagtctaaagacaagtaagtagaaggtctcagcagcgaaggagacaattaagatgcaaggatcatggcatgcatatcttaacctgcatatcatgtctacaaatattgcattttctacttacgaagatcattggacacaattgcgagtaatcgaggaagaagaagaaataatttgggggaagaaatgcaaagaagaagaatgtgaatagaggaattcatgggcacaagtccctagacaaccccactattccaattgattccgcatgctctggcagtccctagacaacccacaatcaccttgcacggtccatctcagccgacatcaagatgcggtaaaataaaactcatatatatcaactaaaagaactaaaaaaattgaaagctcattaaagttttatattataggtttttaatttttaaaaattatttttataattaatatatcaaaataatataaaaacaattaatttttaataaaaaaaattaaatttttaaaaaaacgcggcgcaacgcgttttcaaaacgctcacgaaggacacacactgaacactctcctttcattattatctgtcttttttctgacacactctttcacttattcttctttcttctcactcgctgcccaccacacgaaatgaaggaaccacacacacacccacacatggctttgcgatgtcggtaggagaaatttccagcttacattatttgttacgtgtcttgtctttgtgctggtagtttttttaaagtgttttttattttaaaataatattttttattttttaaaaattattttaacatcatattaaaatgatttttaaatataaaaaaataaaacaaatttatattttttaaaaaatatttttaaaacctaataataaacacaccaccggccataattgagctaagatattttctagtggaattatggacaaatatttctacataatccaaagatggcaggcggtgataaaattctggattgatcttcaatagatttcacacctaagatgatcaaagcaacctttctttgtaacctaattgggatttacattttagataataaattaattgacaaacaatcagttcttagttaaagcaagtgtatgtgtctgtttggtgtcgagttggaacaacggttttttatccattttaaaaatatatttgacttgaaaaaatattaaattaatattttttttattttttttataatttttacatgttgatgttgcaaataaaaaaaactttaaaaaattattactttaattattttggcaaacaaacaaagatcataaaaagactcgttttcctactcttttcttatattttagagtttaggtttgtttcttgtaaatacattcttttagttttattttaaagatattatatgattaattaatatacatactaaaattttatttagatatcaattataagtttaatatatattcaatttgaacatgcttgctagaatctatgtatatataattttttttttatcatgatataagtcaagcttgtttggcagtgtggttgcggttgcttttcaaatagcttttcgtgttaaaatgcatgtcaatgatatttttttttatttttaaaaaattatttttaacatcagcacatcaaaatgatatgaaaatactaaaaatatattaatttaaagttaataaaaaatgaatttttttttaaacgcagaaacaagcagatcaaaatatttaaattataaaataaacatgttttcttctcaatcattgtcataagatttggacaacattgtatgtataaaatgtgggtgtcttgggctcaagatcttggatccctcaatcatgatcctttctcaattgaatctgttaaaaaataaccgaaataatttattattattatttttaacaaacgaagaaaactagcacatgaattattcacaacccccctggtcgaagggccccattatctcaacctcaataacagatattattccgagccatctatagcttgacacgtgtcattgcacgtgtcagcaatggattggtttaaaccagtataaataa

SEQ ID NO: 126 - DNA, 3095 bp, Poplar sp.
gaggggaaactgccgggggtccttgaggtctaatcctcttgccccttgccccttgaatctgtgatgttgtcctgcttcttcagagaacaggggaatggcgagagagaaccgagagagaacaggggaagagaaagagagccgagagagaacagccacgagagaactgggtatgcaggaggggaaaccgaatgaggggaaatccaggggaatgaggggaatgataggggaatttgagaaaccaaatgagaggaatgacaggggaatgaggggaaaccaaatgacagtggaatgagaggggaatgaggggaaatcgaatgaactggggaatgataggggaaatgaggggaaaccgaatgaggggaaaccgaatgaggggaatgacaggggaatgacagtggaatgaggagaatttatgagaaaccggaatgagaggggaatgacagtggaatgagagaattcttcatacaaaaaaaaaaaacccaaatatataactcttaccataaactaatttggctttcttcatataaaaaaaaacttattttaagcttttaaaattgaaaaaaaatatattaataggtttaacttgaaaaatatttcacaagcttatttctctataatatgatatgacatatatagttatattttataaaataagctatgtaagaatataagatattataaaaaaaattcatcattatactttttagatttcattcttttattgcaagtgattaaatatttatattaaatattttatatatattagataaacttgaacaaaaaattaattcattaataaattattttccagttcattttccataacataaccaaacactggaaagtgttttccagtttatttttcataatactaccaaacatcagaaaatacttttccggaattcactttccaaaagaaaacaactttcctgcaaacaaacagagcataagaatagaaattgaaattactaaatatttaaaaagatagtagtgaaaaaaaataatttgcttttttttgttttttccccttatgcacctcttttttttaaagctctctcatcaagagagaattgccatccagatagagagaaaaagatactattctaaaaataactcaaataattttttgagttactttaatgccttgcaactggaagaagacatgatgacacgaatcatcacacgtacccattataggcaaaggctggattacatcttggtcctcaaagtctattattgtgtgataaggtcctaccaaccaaaaagaaatgccttcttttactaccctcttgcccttaaagtcttgctatttttaccaaagtttaaaaatatgaagatattgacttttgcattactgaacctaaaagttattcatgcgaggattataaggtatgtaaaacaatatggttcaatttttatagatgatgtgagtaaattaatgaattatagaggacaatagatgagccgctcgataaaactacaagagttagagcatccaatccaaatatccaagaaaataaagttatatgtatatatatatacatatgcgtgtgtgtgagagagagagtgagagagagaaaattattatttcaactagataacttgactcgaaattttaaaaaatatttttatctatatactatgttgatattatatagataatacatttatatttgtcgatattataaaataagaatagaaatgttagatatatcatcgatagaaaaaagccagaatttttgttaattaacacgaaaactaaatgaagttaaaatatttaattgttgaggtcctaagagaatatccaatctaattgtttttttctttcaaattgagaaaacaatgaatccaatgtatttctttcataacaatacaaggatatttggaagttacaatatttataaaacttttaatttacaaacccacaccaatttttgtaggcgcattaacttttattttaaaaatactactccgagaaaatactcatcaaagacccctcaataactgaattcccaataaaaagggactagtttgaggtttatgtaatcaaattaacactaattaatataataaaaaagagattatgataaaacatgtaagataattttaatatgtaaagcatataaacccagtaaaaaattaatatgatacatatctcatgttattattaattaagtgttgaagtaattatctaaataaatctttattttgtaaagaataaaaagtcttctattccatgtcaaatttttagggttatcttatgttgatgaaaaatatagattttttttatttacttctttttggttagactaaaaattctttatataaaaactaacttttacatctctatatatcataaatatacttaatccgctgaatttattcacctctaaactttaattatcatttaatttaaaaactaaatgacatattagctcccttgaggatattttctaacaaaattattaaaatattacaatgttatatgctaaaaattacaaaatttttgaataacacatgcaatataataatttaaattattatgagtttaacaattcatttgcacttttatataaataaataaaaagatgttaataaaatagtattttgagtcaggatatagaaaatattataatatttttttactaatatctcgagttagaccaaatttcaattcataaattcaaataaacaaacgtaatgtttttatttcaataatacacttgacgagaaatatagattgcagggataaatctaagagaaaatgaaaaagacggaccacattagcaaactgcaaggactgcaggtaccaaacacattatcactaaccgacataagtgaaaaagagtggaatatcattaaatggacgattatgcccttggtttttttatgttgccctagacccttcgagatgaaaggccaagatgtaacataggtcggaatcaacggctcacaatcctcattcagccctttatatttttctctaccagccacaaagcacctcctctctttctcgctctccagggtttctagtccagggtttctcaatcctgcgaaagaaagaaagaaggaaagaagctgtttcaaagttcaaa

SEQ ID NO: 127 - DNA, 3630 bp, Poplar sp.
tctagaccttaaaccctcaataagggtaatcttttctaaaagcaataccatgtaaataaaacacaagagttctaaagaagaaaatgtttgttggaaacttaaatgcttaagaaataaagaaaaatagtgaagaaagcaataaagaaaataaaaatgataaaatccttgggagaaaaatgatatattataggaatctaaatatactacaatgaccattatttgtagtaatatctagctttatttatgctattacaatgtttgagtcttgtttacataaataattttaattctataaaaaaattggtataagataaagtagtttattaaatcctaatgcaagtcaaactatttttttattaacacacacattaatcttaatttaatctttaactttgaatattggttgaaaccgcattttccaaaaatttaaatttattttgctaaaattatttatttttttgttgttagattgttttgatgtgctgatgttaaaaataattttaaaaaattaaaaaatattattttaatacatttctaaataaaaagcactttgaaccgcaaccgctaccacatttgtgaacacaccctcaatattctttatgcttggcatatgtatatttactttaagaataaacactcaatactgaaattgagaggtccttttatagagtaattaaaactgcctataatttattaaaattaatttaattggtccctgtagattttaaataattaaatatttccttaaccaacaatgaagatgtcttcgtctatagtcaatccgattttctattaaatacatgttagttttttattggttagaagaataataaaaaattgttaaaatctcaaaaacaagtattaagaaatttaacacataagtgttaatttttcttaccaactttttaatttatttataaatttaaatgtttttgaatttttccctttattctaaagagaaaacataaattaaagaatggttgaaaaacttattgttaattttttattaatatatgttgtatttgttattattttttataatttttatttttttagctaactatctatttatttaccatagaaaagtgtcttttctttatttaatttattttattaaataagtgttgctttatttttttacttcattaatgatattttgtatttgttgttatttcttaaaattctttattttttagctaactgtctatttatttatcataaaaagtgtcttttattatatttttatttttttaaaaaaaaataagtagttattttttacttcattaatgaaggataaaattatgtatttattgattaaacatatatgattcaattttgtgtatttttttcataggcatgatctttcaatttaattttgcatgaaagttttgatttcatgtttaaggttttataatctttacataaaaagtttttctagaagttttcttttgatttaaaaaataaaaaaaaattcaactataaaaaaaataatctagcataaattaataaataataatcattttcttatcttcttgtatttttaaaagtatgtaaaaaaacttccactataattaaaattttctaaatataatttgtagctataaataattaaaatcttacaaattttaacaatatttttttgttttttgaattttttaatatttttttttcaaagttttaatatatatatatatatatagagagagagagagagagagagagagaatcaatgaaaagctgaatcgtgtccattctcccctttagaagtaaaaaataataggaaattaagctgattatagacaaaaggatattttctacaaaattgactaaatcatacggactgaattacccaaacaaaaactatgaaaaagtctttattaaaaaaatcaataccacaggaacttctaatatcattaaatcaaaattattaggtacatcaagtggtgtcctccataaaatatagagagagcttctaatatccctctggtgtatatatatagttccaccataaaattatttataggtaccacttgtacatttttatgtatagttttaaaaccagccggcgggatctaagacctggctgatccagggctgaaactgagctgaattttaaaaaaaaattaagaaaagtcaaaactcggggtgacccggctgacccgataggttgactcggttatctcggtaaaaaacttggttgcaatccgttaatttttgtttttttaataaaatttgattaacccgaatgatttaataacctagttaaaataaaaaaatccagatctttgacgttaccgagttagatttaaaaattctgattttatgtgagaaaaaagaatgaagttatatatacacacacttcagagagagtgtacaaacacagcaatgctcctctgtactgtcctgtgtattttcatctcatgtcatttacatattaatttttttttttgtaaaatttttatatttttaaattattttaatatgtttatattaaaaatatatttttaaaaatatattattttaatatatttttaaataaaaaatatttgaaaaaacgatgttaaacaagataagaaagggagaccacatttttgtctgtggatagatttagtttttgtccctcatctatgttggacttcaacccctattgtttaaagtctttccatgttacccttctagtttcaagaagttcccaacatcatccccaacttaccttttgaatttagtttttgagaaaaatattatgacatatacgaggatttaaatgaaaaatgagaggaatgtatgaggaagaaaatcaaattatgaaaaattcatattttttagttatttagtggtaaatggcaaaacaattaaagaaatacaaggataaaattaaaaaatttcgaactatatgattagaaatagaacaatggtgaatatatagggcaaaaaaagaaaagaaaaaataggatcaggtgttggaggctataattaattataaaaaatagtaaagtttttacgttttaccggcagtgaaagtgaattagataggtagggacggaatcggatgagtcggtctcttcacgcactcaataagccgagcatcatccatccaatccattccaatttctttacagagaattgaagaagaagcttgattctctctcttttttttaaaaaaaaaaatattggattctgtttcttcttcaatccatcctcagctcccaaagaaaaaaacaagaagaggaaaccacctctctatctcttcttcttacaggtaactaattcatttatatctgctgttactttcttatttgtttatttttagatctgtatgtatatgcataaacaaaatcagaagatatgaagaaatcgtaaaccctaactgttttgccgcttggtagattgattgatgggtttttggttttatcgggattcgctttgtcttaagatatacagcacatgaattgtagggagaaagcccaagattttattaattgagttatggatcctatgctgtgataactattagaaggattgtctatttatatctttccaatcattgttatgttgtgtttagtgatggttgaaattgaattgggatttttctaaaggtttgatgatttggctttgcaggtgccccccgca

SEQ ID NO: 128 - DNA, 3518 bp, Poplar sp.
ttaaaattaaagtaagttaaacagtagtgaaaaaataatatcttttaaaattattttaatggaaggtttgacataaatagaagacaaaatacatagaacagcagtaatgcatgctgctagagcacacctacagacctaataataaaaacactaacacaaaagccttatgattcaacagataaaaatagataagcattttcaaaaacatttaatacaaaagtgagggaaaaatatacctcttctagctgctgcatcaacctgcttgttgctaaaagtctaagcacgtcaaatccaccttggtgtactttttaattaagtttttttatttttttattttttttccttttattttttttaaacttcttataattttttattttacccttcaaatcaaatttataatttttttttccagtaacaataatttttttttaatttattaataattatattaataatattaacaataatagtaatggtggtggtgataataataagcatgtctgacccaagtttaagtgggtttgacaagcatgtctgacctatattggttaggtctagcaagcatgtcacgctcatatttttgggttcggtaaacatgtcagacccatattagttgggtcaagtaagtatttcagacccacagtattattcaattcaattcttttgcttttattttttttatttttttccctgatttttttttaaaattattatagtttttaattttaccatttaaatcaaatttttggttttttttcaatagcaatagtatttgttttcaattttataataatatttaacaaaaataacaaaaataacaataacaataataataaacaacatcaacactaataatttttatttttaccatttaaatcaaatttaagggtttttttataataataatatttttttcaaaattattaataattatattaataataatgaatataataatacttataacattaagcatgcctgatccaagtttaagtggtttggcaagtatgtcgaattcatgttggttgggcctgacaaacatgccaaatccaacagacccgtattagtcgggtctgacaagcatgttagatctactttctttcctcttattttttttctctctattcttctcaaaaatgatttttaaaaaatctatttagaatttcaaagttgtatttgaactatttcaacaagaaaagacaaaagaatcctctaatttaaaaattaaaaatttgtatcaaatccaaacaaactattttatccgatagagattttgcccgaagagcaaatcagaatctttcaatttgaatggtgattgagattttctgttcttagaaattatctgcgtcttttgatatatcctaatattaattcgatctcaatatgaatttattatattaatatgatttcgtccacagtttatagtgggacttccaagggattttttttatcagaagtgtgaaagattttttatggtcttgatggaaaaaaaataagaaaaaaaatattttcatcgctcacagtacataaaaattttatgtaagatttttatgttagttacagtacctagcaggaaaataactgaaagtctaatttactgaattttaactggaattaagaatataaatatgaattggaatatgttttttctaatgtaaataattattataaaagggaaaaataaaatattttatagacccaagattcgatattatttttattactataatcatcatcaagaatatatattaaaaatcaaggatatgaatttaattaattttaatgtaatttttttgtttctatttttttttattatgggatttcttgttgtattcgatgcttaaaatagattatcaatagacattagatttaataattttattttatatcaattgtaatcttagttgttgtgtatcaaaactgatatatttttttatgaattatattaatattttaatttcatttccaattagagatagatttgaattcatatcattgacatataaaaaaataatattttttatatagagtagtcttttaaatacctacgtataatttaaatataatgatatctatttaatttttaagaatatcaggtatggattttttaaaataagatacaaaatttgttttgttttgatatatatagataataccgtgggcttatccagtgcaaacacaacaacgattcactcgtaagcccaattggccgtaacgagcaaacccgtgccatggaatgacaccgaacaaagattcgtcaagccttctaataaaaatctcagttttttttatttcaatatttaaaattagaaaacaaattatcaattttttctctacaccttcaatgtattcatagactaaaataaaaacatgctgactagcataatacgtactagtgataattcttcattttttattattttggctagacttatatttattcattgttttcaagacgagctatttacaccatggttcttacaatctagaaaaattaattaattaattaatcttttcggttctatcaattatataatctttaaaacacacataatttaattttgtctatacattttatgtgtttttataatttttttatttatttaaattaaaaaaaaaagccaggagatgggaaatatcaaaccattgaaaatacattttttcaaacaaaaggctatcaaccttcatagttattatttttatcacaaagattaattttgctgtatttaatataaaaatcacacgcgtaacgtggaagaaaaataaaggtcacaaagcacgcgcgtatttgaaccaatcctttcaatgccgtccatatctatcctactaaccagcgtgattaccacgaatatcatatcttgccagctcatatgtgccgtccatttccacaccatttaaacggaatctcagccctccattattcaactaagcgactaatcctgtccgtccattctcccaaaccctctatataataatcacatacacaactttcatatctacctaatcttatcagcaaagctctagtttctccatagatctactcttcatggatcatccttcgatcttttcaattgcagcttcatatagatcgccttgcgatctttatcttgatatccgtttcgatgctcgaactccatgatcttgatttgctcggagatagctccagaggtatgtataagtgttttgtttacgttcctaagctagatctgattgaatatctgtctattggttattgatcaagtcattaatccgcgtaaatctaattttgttctgtagatgtggcgcggctctgtttcgatagctcaaatattaagcggatctgtcccttccggccatgctttcttcgatcatgaggaattttagcaatatttaagtttggttgttggcggaaagcagaagatgatttgagattttttctgcaggtggtgttgtaagcagttacagaatccgctgaacgtgttgctggatgtagacatggctgaagattggttatgtgagctgtggtgtagcatgtt

SEQ ID NO: 129 - DNA, 3590 bp, Poplar sp.
tccactcttgttatgagcgacgaccacaaaaatcagaaatgtgaagtaaaaatacaaagaaagtcacaaaatcacatgcgtacaccaatcaatctaattatctaaatgttgttcttgtgggattattttttaaaatattttgttgattataaatatatttttttattttttaaaatttatttttgatgttgaatattaaaataatcaggaaaatattaaaaaaataattttaatttttttaaaattataaatgaaccgtgtttaggccgtccacctatttgagattgtgataacagtcacggtttaaagtgttttttatttaaaaatacattaaaataatttttttttatttttttaaattattttcatgatcaacacatcaaaaaaaaatttaaaaatatataaatttttttaacaaaaacaaaattttaaaaaacatgacaaaagatctcgtaacattattgactaattaacaatatctaagtggtgtgggggaatcactgttcccccacacctaaatcactgtggattacaacagtaattcacgatgttttttcctctttttttttgcattttttcatttttctttccaactttccctcctttttttttcgtttttgtttttgaaattactttcctcttatcttttgctggcttgagtggctgagggtttggacatatttgttcatacaagtttcagccatccattatatacaaattgttgaaactgacatgacatctttattgtgcgtagcagaagctttggaggctcttgttataatttttagttgccttctttgacatagggatttttttgggactgtgaacaagttggaggtgctgcaactaggaattgctttctatttgtttgcaactggtaggccttgtaacattccctggagaaggagtggattgaatctgaaattagctcgctcatgtatggtgcttgtagttcattttttccttccttgtcaaattctcattagcctccggatgctgtttcattcaatctttgttcttctgttgatgtatttatattattgctcttttgggctattgtgaaaaatatggtcagtaaaaagcctagaaaaaactcaccggaataataattcacgatgttttttcctctttttttttgcattttttcatttttctttccaactttccctcttttttttttcgtttttgttttcgaaattactttcctctttttttttccagctttgcttttttttcttttttttttccattatttttttttaaaaaattatctttgttgattttactttttagatattgagctggttaaaaattctgctttgtaatttttttcctttaaaatactttggattgctacggtgttttcccacatagtttttctattttattttttttatttttcaaaattatatttgttgattttttttatattgagctaattgagaatttagttttgtaatttttttatttaaaacattgtttattgctacagtgtttttccgcgtgattttttttgttgtttttgtttttttataattttctccgaaattatctttttttattttattttttaatattgaactgattaaaaattacagttacaatatgcgaggaaaacactgtaactttcctcgcaaattactgtggattgctatagtgttttttctcatatggtttttttctgttttgttatatttttttctaaaattgtctttgtcaattttattttttaaatattaagctggttaagaattgcaattataagtaaatacaagtttttcctcacaaaacactatggattgatacagtttttcctcacatggttttcttacagtttcttttgtgttttatttttttgtaatatttttttccaaaattatcttcgtcgattttattttttttaatattgagttggttagaatttaactttgtaataaaacttaatcatgtggggaaagtattgtagctttcctcacaaaacattgttgaaaattacaattacaagtcattacaaataaggttaaatcatgtggggaagcactgtagctttcatcacaaaacacatggaattgctacagtgtttccaacatgattttttccccttttgttgtgttttttttccctaaaattatctctgtcgatttgatttttttaatattgagctgattaagaatttagctttataatttttttctttaaaacactgtgaattattacagtgttttcccatatgatttttttttctccaaaattatctttgtccatttttttttaatattaagttggttaagaattataattacaataaagctaaatcatatggggaaagcgttgtagtttttctcacaaaacattatggattgctacaatatttctctaaatggttttttattttattttattggggaaagcattgtagttttcctcacaaaacattgtcaattgctacaacgttttttctcatgggtttttccttccaaaattatctttattgttttttttttatattaagttgatagataatttagctttgtaattttttttgttttttattaacagaaaagctaaatcatgtggcaaaaacactgtatctttcctcccaaaacactgtgaattgctacaaatcattttgttcagtctctaagttttgatcaccaacataattttttttttcattataaaatattagctccattatacttttaatttctactagtgataatttataattataattataatactattaaatatatttattttataaattcggggcatgcatcttgtctatcttaaccagcgtgattattacgaaaatgatgaagtcaatatcttgccagctcgtctataccttcatcgccacctactttttcaaacaaggcaaccactcaaccacgtaaactaaatctcagccctcaatcattcaactaaactaccaatcctggccgtctattctcccagatcctctatatagtcacacacccgcccatcattctttatctgccttagcagctaagccctaatattcgtagatccactctccacggtacctcattcgatctttttgattctagcttagcctagatcgctttgcgatctatatattgataccagatttgatattcgaagctcatccgatgcttcaactctatgatttaacggtctgctatctggtttgatcggagatcgatgtacgtatcagtatttttcttatgttttcctttgctataactgatttaaactgtgcttccgaattattgattaagctattcatttgatgttgttttgtagatgcagcggagatctgtttctatgggtctaattttcaggggatatatcccgtcggtgtgcaagcagaagatgactcgagatatcatttgaaggtggagcgataagcagttacagaatctccgttgcttgatcatgtaacctgagcagtgatttgttgattgattgaggagtgatggaaggagataaggggtggggctgtgtgttttgtttatgaggatgatgtataagatacatatatcgggaccaaaaggccaggaggctgagaggtcttgtttattatctgtcatccgacctttgcc

SEQ ID NO: 130 - DNA, 4214 bp, Poplar sp.
attatgcaaatgacgccataaagccatttaatcttcgataagttagtgtatgatctttatccctgtaaagaaagtttgttttgccacaaacaaacaaaagaaaaactcacgtttattctccaaatcgctgctgaaatttgtaggtaaaaaaacataatataatctcctctaacgaacccaaataggctccttttgggttgcaagctaatgagcctaaactagtaatcaattaacataagtccaataatgaaataaatccctaaacaatatctaatgagccagaacaaacccaaattaaaaataattatccaaaattaattaaataaataaaataagataataaaaaacaaattcttcatgctaaaagtcctccatgtagcccgaatctctatttttcgcacattcttggcagattttcagtcttgactttaaacacgtcgttccttttcttttagatgaattactaggcctaccatatatggttagaaattttgagatgtctagtttccagcccaacttgaatcgcagaacaattacacatgtagctccagatatgtcctaaatagtacacaaaggtctagtctgacagatttgacaagatttgtctagtaactttaaccttctggaataatatgttctcgaacttcatttaatctgaaaatttactaaaatatatttccatgtctttagtagcttcctgtaaaatttcagctcattttgatatatagtttgaaagatatgttcaatcttgcaaaattggtcagcaagcattttaaaaccaaattctaacctcacctagtttgtatcaactgtctttccaaagattgtgtacatgtcaaggctaatttagataaagcagttattacaaattcaggaaagtgaattcgggaatttcacaaatgctctactttattgtacatgctttatttgatttaaaaaattcatagatgttaaataatctaattttgttaaagcaagatttaggaagggtttcaagtaatatatgtttgatctgatgtagctgattcctccaagactaaaacttatggagaattatgtatttccttgttcatttttacaaaaaaagaagtaacaagctatggtgatagtcacagttttcaatatgaatgagagaggaaagaaaagaatagggtgataacatatgtatttagttaattttcacaaggcaaaagctcatgaagagctatgtatttccttgtccattttgacaaagaaggacgtaacaaatgatggtggtagtgattgggctttatagtggaaggcatagttttgaaatctagcccggctggccaacccgggacccggctggtccggggctgaaatcgggtcgggtttaagaaaaaatagaggaagtcataatccggtgtgacccggttgacccgacaaaacccggtaaaaaatccggttgtaacccgttgactatttttttgttttttttatcgaaacgatgttgttttaatttataaaaaaatagggttgacccgggtgacccagacaaaaccagtgacctgggccttggaccaggtggacaaccaggccgggtttcaaaactatgaagggaggggctaccatcatgtttcagagagagagagagagagagagagagagagaggaaaaacaaggaaaatagtggtagctttgtgaagaatttttctaaagatacttttgatattaaaaaacatcactatagcaagcatataatattttatatgttctcttgattgagttgtaatatataatgtgaaattaattttaaaaccacggatatgcaagtgtgatttataaaaaaaaaattggtatgtaaaatattcatgtattaaagaacatgagctttttaacaattttctcaaatataaatattatatatataataaaaatttggattaaatttgataatatttatagtttatatattgtccattgaataacatgactggaaaaaaaaactcaaataaattgattaaagtcaatacaaatggatatttgagtttgaaatttgcggtaccaactccaggtaaaccattcacatcattgtcaattacctaaatccgaagagccaaaaactttttcccaagccgccgaaagagacccaagcccatgactcaagccaccgagccggctaccgattgaggttggtgagtaaccagccatgccggttatttcaatcaaccaaattattattagtaatggtaactgctttgttttttcgtctttttatctttttcttcttaagtcattattgtttaaaagtaaaatttaaaaaagaaataattacaaaaatctttcgagatctaaattttatttttccactgtatttttataaattatactttacaccccaaattaaataaaaaattcaaataaaatatattattaaaaatacaaactattattaaacatataaactatagggtgaaaggtgtaatttataaaagtatatagaaaaaaataaaatttaaatcatactgtaaattttttttttaattatcccattaaaaaataacaaaaataaaataaattaaaaatacatgaatattaaattaactggatctataattacactttattttaaagttattataggattatttaagtggattcttaaaatattttcaaattatatattaacaaaattaacccatgagctagaaagttaatatcaaccctcgaagaccatattaaatttgaaaagaaaaatttaatcgaacaaaaatagcaatacatctatatagttttccaagagtaacaaagaaaaattacttccaaaaacattattaaacaccttgaaaaatgaaattattctctcatttttatccatcttccaccaaccccaaccaatccaaattctgacatccaacggctatgttttgtccctcaagcaattgacagaatccaccgtagatttaagagaatcccaaaccaccccatccggttaccagtaggtaggtctataaatactaagtaaccaaagcagttttatttcgtgattctttggggtctgattagaaactctcacacaggccgacaaactcttaagctttcctttagatctgtaccggtgagtcctgtccaaggtacctcctgcccttctccactttatagtactgttaactctatatcatattgcatgctctcttcatgggttttctttgcagactctagaaaaatgaatgtttaaagagtggttttttagtttcttggtcttaagttttttagtaaacatggttcaaacagttacagatctgggtacttgttgcgtttattctggagtctggtctgtgtcgggtgtgacgttgaagatttcgttttgactgttagtgtgtgcagaacatcatgtctgaaaggcatgtgtttcgcttacattttcattaaaatacatcagatctgattatttttatcaatttgatagttttttagtgatgaactctctgaaaatatatcgacagattccaagaatgttttgtattacttgaaaggaccatgtagggttgcgatcataatcgtatcagagtgcctcttgcttagatctagtgtttattcatttctatcgtataattactaataaattataccaagaaaaatgtaactttgcgcttctgcaagtaactgaggcacgtttggtgtctctacttttaatataatcaatggtagaaaaaaaactgttataaactgtgcaaaacaccttcaattcataatggggctcacgatactctgggagctcactctgtatgagaagctaatatttttgtttgccgttttggtactttcaccatatcatagcatgttaatacctgaattttcactattgggggttgttttattgggtatttgattcttttcccgactttttttttgacaagtgattctatagaagtttatctcttccagtgctaaaggaatctaactgttctttgttcttttttaattgctctcattcaggagcataaacttttgagtttcttatcatttcctgtactttgattctgcccgtttataacttgttttagaaaagtttgaagaatcttaatcagtcatgagaatattttcggcactattctttttaccatattctcacatgttgatggaattttgcttgccacactaattaagcaagcttagtttgcacacagttgccacatgtcatcatattaagagatctttgttgtgaattttgtgacatgcagctcaagaaa

SEQ ID NO: 131 - DNA, 3000 bp, Poplar sp.
aaaatattattttaatatattttataataaaaatcactttaaaaaacaaccactatcttattttcaaacaaaatcataataatatcaaagttggtgacgcttaccaacccccgaccgattctaactttttttcttaatattattttaagcttattttgaaaattgagtcgttgtaggtgtcaattatcatattgttcttgttgagtgcacacatgttatttatatatagtatttgtacggttggcacgtgaactttcctaatttatgtgcatcatttattgggatacataggaattctcattgatccaatgagggaatggaaaaataaataaataaagaaaactaaattataataaataaatttaatttttaaaaaaaaacctccttacaaccaccaaaataaacgggcaatgtctttcgatcatagtggtaagagtttggcatcaagatatttgctatttctgtggtctcaggttcgagctctgtggttgctaatatgatggccactggaagcttacatggtcgttaacttcaagacccgtgggattagttgaggtgcgcgcaagctgatccggatacccacattaaactaattaaaaaaaaaacttcgctgatgaacgaggaccaccagcaataaacctccatgctgatgcagtaacgcgtcatgctgcgcgtgggattaaccattcacatcgttatcagttacctgaatctaaagagccaagctcatgactcaaggtcactgagccggctaccggctaaggttggtgagtaactagtcattccggttatttcaatcaataaacaaaacaaatcattagcagtaaccagccaagggtgtttttttttttttcattttcaaagacagtatttcttaaagaataatgttaaatattaaaaaacaataaaagaaatttaaaaatacactcgacccttgaattagtgaaattcataattgaatatccccttagaatcacgatcaaataacctattatattctttgatttttttatttaatatttagtaaattaaattgtatgatatataattagattctaccaaactatcagtttttatgaaattcagtccataatctaaaatgtttaagatttcatattgaatccggaacgaaaaatctggtaaaaaaaagcatcatatagtttttcaaatgtaattaaggaaaactgccacagttttcaacaccttgaaaaatgaatttaatttctcactctacgtgggagtgtttcagtaaattatcatatttttaaaaaaataatacagaaaaagaaattaagaaattgtaaattatatttatgacacttgtttcactaatagagatgatgataacaatctattaaactttttgttaaaaatataattcacacaatcataaataatcaattctccactattaaaatacaattcacataaataacacataatatatttaattataaataataaatatacactaataatcaaaacaacatagcatcttattaaaaataaaactaactataatatccaaactagtttactaattatattttaaaatatattactttttttttttatgacgatgaaaaacaaaaaaaaatacccaacctatctcccaccaaccaacccagcccccaaattctgacatccaacggctatgttttgccctttaagtaattagcaccacaagatacagattcctccgtagatttaaaagaatccaaaccacctaatccggtaaccagttggtagggtagttggtctataaatacagagtaactaaagccgttttattgtaccacaccaccaccgcctaagaaatcttgaggtctggttaggaacacaaacacaggccgacaaagtcttgaggttttctttagatctgtacgggttactctagtctaaggtattaactcgttgcactttctcatctatatttagccttcatgctctctctttatggcttttgtttatcaactctagaaaaatgaatgttaatgttggttttcaaattcaatatagtggtctttagtttttgagctaacttggttcagacagtttcagatctgggtacttgctggtcttttaatctattagttcaatcagtttggtttactctgctctcttcttgtcgcgtgactttaaagatttcgttttgaatgtcagtgggtgcggtacatgatgtctggaagattaaacttgtcatgtgtttcacttacaacattgcagtagagtgcagaagatctggtttttatttacaatttgatagttttcttaggggtaaaagtgtttagaaatatatccagcagagtcgaaaaatgtttttatataattggaatggaccatttatggtcgcaatcataatcgtctcagtgtgagtagcttagatctggtgtttcttatccatttctatcgtacaattggatcaacaagttatgccaagaaaaagctaactttgcacttctgcaagtaattgaggcacgtttggtgtctctacttttgattaatggtagaaaagaaactgttgtaaactgtgcgaagcacccctgaatttcactctgtgcgtgaagctaatatttttgtttgccgttcggtactttcactatagcttgttaatacctgagttttactgtcggtagatctgttgttgggttgtcgatttattttaacttctgtttttgacaagcgtgattaattctataggagtttatctcattccagtgctaaaggaatctatttcttctttgttccttttttattgctctctttcaagagtacagacttttgagattgtcatttcttgtacttggattatgcccttattaacttgttttgtaaagtacgaagaatctaaatcaatcttgaggatatttttggctctttcttccccatattcctacgcgtagatggaatgttgcctgccatagtaattaagcacacagttgccacatgtcaccatattaagaggtcttttgtgaattttgtgatctgcagcttgagaaa

SEQ ID NO: 132 - DNA, 3238 bp, Poplar sp.
aaatgataaaaaataaaataccgttttaccctaaaaggcagccaagtgatagttttatcaaaggcaagaccgtcaatttattattacaattcacaataaacaaaggaatatgtacaatgattttcccacatgttttaacatttttatctaatctttaataaaaacatctattaataaaaaaaattagaaatgaggtcaggtcatgcttttggcccccccaaaaaaaagggctcgtgcattgacttttaattgtttttaaatgaatagggcgaatgacgtaatgctctggaaaaaaaaaaacaacgcgtcatctatcagtcaccagattccaaccattggcgcgactagaaaaccagtgttagttttttttaccaaaaaatatatcttcaacccattaaaccaattaatgaccacaaaacacacaaaaaaaacaactcaaacctaaaatcaactcgaaaataaaaatctcttggagctcagatatgtttgttttcaggtgtttttaagataaaaaaacacttaatattaactaacctattagaaaatacatagatccattttaaaatattatctatgaagacatatcctctacccatctctattttaaaaatgctgaaatccattttaaaattttttaaaaacaaatttatttttatatcattatttttatttttttaatcaaatatatcaatctctccataatccctgtccctctggtcccatgaaaattaccgaacactacatgaaataaggcatgtttgacgcatcatttccaggagcattgatgtaattaaacgttgcgtgtatcacataagagaaaatgttgacagccctttcattgtttcaggctctgcaccccgcattttatttccagcactccaaacaaagccaatttgcacccttgaatgtttcagtacactcgctgaagttatttcttggggattttcgaacgattcttcgagtggtcttttttcaaatcttttcacgcagctccttcaccgtattgcttcccggaccttgttgccggataagtgcatcactgaaggcatcatccatgtgttctgtccatttaaacgcatctcgccttcccacatgattcttctctgatttattacccgttgcagatgaacagaggcatcagacaaataacaaaagcaggctaccgaccattaacgaccaaaaagtacagatgctgtcacctttatgaagatttcataaattgattttaaaatcatcgagttgtttagcaattcactctttattatttatttttttattacctttttcgttgtttgttttttcttttgattttgtccctcacggtttttttttaattatcttttttatgtttttttttcttttgattttgtctctcacggtattatttcaattattttattgctttttagagattgattcttcgttcttttaattattttttttgtactttttaatttttttctttcaattatttctttaatattttatttcatttgtttttttattcaattttgatcttcattattttaattatttttttcatcattttttttatttcaatatatcccttaacattttattttattttattttaattaaattttaatccttattttttaattatttattattattattttttaatttgttttttctttcaattagtccctcaacattttattttattttttttgtaattcaatttaattcttattctttcaatttttttcttatcattttcttaatttgtttttctctttcaattttcccctcatattttattttatttattttttatattcaattttgatcctcttttttttaattgttttttgtaattatttttttattgttcactaaagtgccttggtatttatttcattggttttatactagctcaagtcctcattgttttgattaccatttattttctttttaattttttgatagttaagaattttagacaatacttttttgtcttatatagggtcatatcggtgttataatcaaagttactaattttaaaaattattccaatttaacttcaattttttttcaattctatcatacattatggttgacaaataatgtattggaatcaattcccattgcatctcttcttgccaatccaattgtgagtgttattgggcattcaacttttttttttttcattttctttcttcgaggttatcccaggttaacttaactttactctttttttacttaatccttcgatgttgggctactgggttttgagattttttattttttgtatatttttttaatttctatagagatatcactagtcatatttttgtcagattaactcagtatgacttggtttatttatttagctccgatccttttctctagtttttttcttaaaataattttcttatcacaatcttgcatcacggttgatgtgctagtagagtggacccgagtcggctcaagtgtttttattttacatttctttttttaaatagatttgtttgtaattttatcatttgaaattatatttttagagtcccgagctttctattttttcccctttcattcctaagatgttatcctagattgtgagctagtcaagttaactcgggtttatttaagttatatttattttaatatcttctcttatattttaaaaaaattgaccctggaaaaaaaaatagtaacaataataagaaaatgctaaagttgggcaatgggccagattattgcagaaatcaaagttgatccatgggctggaccatttcagcaatcaaagttgggcttgagatccctggaatccaaccaatcttacattatcataaatgattacttatgtgagagcaaagaagcacaaagagaagcacaaagaggaaagccaaatatcaaagggtaaggcgtccaaaacttaagacccacgcaaccaatagattataagcgcaaagatcgatgacgtgtctaaatttccaaatcccgcctaaacccctgccacctccccaatttcatttcacccgcaattgaatttcaatttccttcacgacacttaatatctccgcctctccctcaactctcttcctattctcacacacaatatcctctctctaccactcttcctctctctttcaaaccctaaccccccacaccggtaagtctcgcagattctgaacggattctcaccctttgatcggttctcattgatttaaatcgtgttttgagctgatccggtgttaaaactgcaggtttctcc

SEQ ID NO: 133 - DNA, 3013 bp, Poplar sp.
atatatatatatgaatttcttcgtgaatctatttaaagtagcctgttttgcaaaattattttacatagtagttaatgaattaattcaatattcgagtaatgagatagatgaattaattagatttgatttagaataattagtgtggttttaaatttttttaaaaaaattaaaataatattattttaaatataggattaacttgttattataaacaatcaagtttaaccgaataaatttttataaattataggattaacttgttattttctattataatgataatatataaatagaataaattttactttttcataataaaccttttaatctcggtgcatgaataacttatttcaatcaaattaagaacataagcttaatttcaatatgaaaacttcaatgaaaatattaccatcaaaagattggattaaaaaaaaaaccataacaccaaaattgtttcaatattattttttcctagtgggaccatccaagagaggtcatttgataacaatgatcatagttggtgattgaaggccccatttaaggcaccggcctagacaccattgttggctttcgcttgtctccacgcccgtccttacattgtgaaattgttttatggtttaaagaaagtgaaaagctaaaaataaaaaaaataccttaaaaatagcaaattatttgaccacaacagtgaaaagtagtccttcattattgtttacatacacaaaaggtgccatgaattagcctttctttagcctattactatgattatatgtgcaggtaggaggtacccaagctcccgtaccatttttattttattttattttcgatattggttcaaaaagaagttgggcaccattagtttctgtatttagaaaattaattagaatacaaattacatggaattttttttttatctatatagtgaattttatttttttttattttattggtgaaaatatttgaagttgattttggtatatcaagattaaattctatcgaattttgaacaagttaattattcatatttaaatcaatatatacacatctaaattttttttgatatgtttaaaaatattaataaaaaaaatcatatgtgcaaaaaatttaaagcaagcaaacaaacaaacaaaagggtaaaacttgtctcttgattgtacttaattagaatctttgaaaataaacaaaacaataatgtacaagatttgcattcaacttgcttgggtggctcttgatgttctcatatggcaaaatcattttgtacaaacaaatatattgcttggcatgtgattgtgtcaaaacatattaaattgtgtttgtcatgacatgtacgccactccaggttttgatgataatgaagactagcagttccaagaaaaaagccttaattcatgaaacaccatttgtcttttaggttttgcaaaagctaaatcatataccatttcttttagtatataatcttactaattatagggttaattagaatggtgagtagcacgcgagcttatcaattttttttaatgcacaattaatatatataaatgtttatgcaagtcattaacttgagaatattcaataacatcaaataatataataatctgacttaaactatagaaaacaatagtagatagtagatgaatcgtacaaaaaatatttgatagcaattaactaaaacaaataaaatgctaatatcatacctaaaaggagaataaaaaaaatcgctagaaactcaccgttattctactgtgaataatgcctaccaccaaaaaaccttgctgagacggtccaaatctcactgcaaaagagtgcatgacattaaaaaaaacctgcatggatcgatagagcagcattgcaggaaaaaagagaggaaggatactcaaccaatcaatcttatttaactcaagaataaaatttatctaaatataaatttaataaaaaatattatttatatccacaatgaattgtgtccaggtgaacaatgttttctccttctttttcagtttttttttttaaaattgtttttcctatatggcttggttgcatcttgcacccgattttcattataaaaaaaaatataatgaggtgaatttgattttaatatactttttatttttttgtttgatggtaaatatatttttagactaacttatatgttaactgaaactaagtctactattgaacattttaagtatattatcgaacattttaagaatatttctcttatatcaatctggtgtgtgaaagcgtgtttggcattgcgacaacggttgatttcaaagtgatttttgcttgtaaatgcattaaaataatattttattatcattattatttttgacaccaacatattaaaacgatctcgaaacattaaaaaaataatttaaaaaaatttaaattaaaaaaaaactgcatttaaaacactaaaacaaattaaacatattcaaaatagaaacaactcttctcaactaagaaaagaacaaaatgaattctcttcaaaacaaatatcagcatgatcaacacggttaattcgatccaaaaagaggaaccattctatgaaaaaaaaaagaaaagaaaaggggcaaggttaggctagtacaaattaacagaaaatcaaatagaaatcctatacaaaacatgaatgcaaattacatgatctaggcagtaattaacctccattattatgccctcttagaaaataagaacacatgggaacccactcaaaaagaaaggtatggtgctgatatatgaaatggcctccaccatttggattgccaattcatatttgattttaagtatttgtcaattccatcaattaaaatcatataaaaattataatctcaatcatactttatatgaaaaaagaaataacatatttacaactagcaagacatgctaaggtgtcttgtcagcaatatgaggtgtcaagttgaaagattctccaagtgagcatgctccctatgatctcatgctctcattctttaaataatctatgcatttcactcctctataaatagctctcgca

SEQ ID NO: 134 - DNA, 3287 bp, Poplar sp.
ttaagatattgttttataaaaaaccatttaatttttattttataaaacatcaataaacattctttttgtgcaaccaaacatggttcttttatattttagattttactaggttgctttcatgcgagcatctattctttttatcatataattagataaaaaaataattaaaaaaaacaaagttatcaagcctaattaggtcaatgatctaggtcgcgaattaatcgagattagcctaagtcgattcaatatgttgtcacctcaacatttgaagaaaaaaaattattcttgaatttttttaagatactatgtttttttaccggttatccaagttatttttgaactatcaaatcaactagtcatatcaaaactaatatgtattaatatgtgtttatttacttgctccgcgacttaacatttaattagtgttaatatacttgatctattttatttaatatatacatcaagttttgagtttatattttttttttactaaaaacacattagtaatatatgcatattatttgttaagtaaaaaaaattgctcctcgcgagccagttaactcgtttgataattttatgtttcaatttactagtttgataactatttgtatcataatgctaatatgatgacgaatttaatgcatcaggtagttagtttatttaaataaacgactttaaaaaaaatgtatattttcatatatacattcatatcaaatcacaaaaaaccatgattgataagtagctttttaggtagcggtacaatctgtgttttatatatatattttatttttgtttaaaattatttttttatttttttagtttattttaatatgttaatgtaaaaaaatttaaaaaaatattattttaatatattttaaataaaaaaatatttttaaaaataattattaccacaattttaaatatatattttattaaaagtgagggaagagttcgtgccacaaaatcacaaactttggccttatggaatttaccttgggatttttgttttgagatcaaggaattgtttttaaattatgctacttattttattcaatttacagtgcatctaaatacaaagaagtatacttaatccatgtaaataatgcaatggtagcacatttatacacacttatactcctgttaaaattatatttgattattatttcaagataaaaaaataaaataataaaaataaaatgcacatatcttcatatactttatattttaaaaatataaaataaaaataacatgtttttatgtactttgtgttttaaaagtataaaaatatacggtatattttgtcatatactccgtgttaaagtgatgtttgattattgttttgaaacaaacaaaataaaaataattttttatatcttcttagaaataccaactagacacaatgtaatgaattagagtacaaagacaataatcagtacatatcatataactcaccttccattcaagaggggggaaaacaacaacgttgctgttgagacaagaataacattaaaatgttagaaagatacttaaaatattgattgtcaaatatatatgatagcaggaacatgaaaatggaattcagtgactaagaacaacattaaaaaggtgttcgagaatgtgataacgattgtttttaaaaatattttttgtttgaaaatacatcaaaataatatatttttttattttttaaaaattatttttaatatcaatatatcaaaacgatctaaaaatacaaaaaaaattaatataatataattttttataaaataattttaaaacaacaaaacaaaaggcctctaaaacactactatatgaaagtatggttgcctataagggtgagcaaaaaaactgaaaaatcaattaaaccaagaaaactggaaaaaaaataaccgaaaaaaccgaaccgtgaaaaaaaaaccgattaaaattttgaaaaaaccgaccggttcagttttataagcctgaaataaaaaaaaaaccaaaccgaacccaaaccgaaaaaaacccggaaaaaacagagccaggccgaaaaaacccgagtcaaaccggaataaaccgagccaaaccggtttgaacatgtttttcttctaaaaaaatcaaaccgtaatcagtcgatttgaaccaatttctaattttttttaaattcaatttaattatttttttttaatacaaaccgaatcgaagcgaaaataatcaaatcctggtggcctaaaagagcttgggtaaaaagaacctctttggattgtggtactcggttagccatcataaatttagatgggctgaatatctaaaagacaaaaagcatagaaattaaaaatgagaatgaatagcatgttgcttataactttggcatagaaataacatagcattgggccaagtgattttacatgcaagcatcattattgggaaaattgttttgtatttttctcaacaatgaacacatttaatatttttaaatgtttttttaataatttatataaaaaacataattttaatatatattttttattaaaaagcaccatttatcaatcaaaacatgtatcagtagaagaaggattagatcaaacccaatcaaaatcaatatttatttacatgaaagcatgaaaaatacaaataaaatatgtacatcatacttaaaatgtttttttttttttttaaaaaaaagaatacaattaaaaaatataaaaaactattcgaacaaaattaatcgaaatatgttcgaggagaggaaggattgaatcaaacccagtcaaaatcaatatttttgttcatctattgatttatatcaaagcatgagaaacacaaatagaatttaaaaaaaaaaactgacaaaaggatataattgaaaaacataaaaaactattcgaacctaatccataaatttcacatatctaggaggttccctcaaaattctaaacaaaatccatatccctttcggtttcggattgttcgagtgccgtgtcctagcaaatattaaaaattcttgcgaatttgtcccttgccccccccaaaagagcaaattccccacttgccccaaactaaaaataaaaggttaatcttaatcccacggccacaaggactcattggacagtatttaatttccaacgtactttcttgtaaatttacaatcccatctgattactcctggttccagcgaaaccctcgtctataaatacatactgtccctaacctggcaaagtctctctcgctctctcctgctctcgcaatcgctgcttctttgtctgtctttgggtcgatccgaaagagaggagctcttctgcgcaatc

SEQ ID NO: 135 - DNA, 3135 bp, Poplar sp.
ccatgacaataatacatcaccatataataggtgatttgataataaaaatttgagactaaaaagtttattttttttattgtcttagatttcttatggttactaatatgatggccactggaggcctacatggtcattaactttaggatccgtgagattagtcgagatgcgtgcaagctgatcttgacacccacgttaatctaataaaaaaataatacatgtataaattagtattagaccggatatataatattttaagatgttatttatgatttttttttttatgataaaaacattgttaagcaaccttccatgttgaccgatattaaatctttatccagatgatttcaagagagcgtcctcagttgataaaaatctaatacttttataaaaaattaataatttttcttagatgttgactaaaaattttgaatttttttttccttaatcacgaggacaaccctaaattccccattataaaattacaactcctgaataggagctggagaaaattttgaaattaacaagctaattatttaaaataaattttttttttatttttcttattatttaaaatatcacatggtaacatttcaaccagtgacttcctcaaaagattaagattacagggtattatcataatcaaatgcaggaccacttatgatcaccatcaaattctaaagttaatcaatactctcgaagattagaagaataaaacttgaatttaaatgctagtcaagacattgtcacactcaatatgtatggactttcgttgggattgaataattgctttctcattcttaaaaagtatattaataaaaagaataatttaattctcaacgttactacttatattgggagatagatgtgagcgataaagctttccataaaattattaatccaatattattatggtataagttaaaataaatgatttttttactgtttatcacctcacaaaatattattcattttaatagttttttgctttctaaatctatatttatatttttaatttcatacttcaatatttagtttactgaaaattaaatttcataatttcctgtggtttgttttatatttggttagatcggtctcataactagtgtcacgagtttggcggattgactcgaggtttttttttttgtttttttaattgataattttttatttttcaatttcatcatttaaaattagattgattgggaattaggctttatgatttatcttgatttgctttttatgaggttatcttggtgacatgactcaagtcgcatgtttgacgggttaacccaattgactcgagtttttttgtctttttaattggtatttttttttatttcaccttttaatgttgggttgattatgaattaagcttcgtgatttattttggtttgatttctatgaggttatcgcggttttatgactcgggtcacacattttgtgggtgaactcgagtagactcttgttgttttatcgtgtcctgtttttagattgatttttttttattttcaacatttaacgatgactttattgaaaattaggcatcataatttgtttttatttgatttttataaggttatcacagtctcatgatcttagtcgtgggtttgacagattaatttgggttgactcgagtcatttttttgcctactttctataaggctacctcgatctcatgacctgagtcacgtgtttggcaggttaacccgagttatatttttgttatttttaaaaaaaaatcaatctcattcttcaacattgggttgattggtaattaaattttataatttgttttgatttactttatatatcatcatggtcttatgatttagatcataaatttgttgaattaacttaagttgacccaaatagattcaatatcttgttgtttcaatattataatttttttaaaatattgtgttgaatttttgtgaatcaagctatgtgttttactgattttttaagttgcttttaaatccaacaaattgattatgtcacatcaagtaaacctatacacaatttaaaatattttattagaaaaatgttagaaatgactggatgtttctttcttatgttaaaaatagtttttttgatcacgtgttttgcagattaaccaagatagacttatgttattttattgtgtcctctttttagatcgatctttttttttcattttcaaccttcaacaatgagtttattgaaaattgagtttcataatttgtttttttatagggttatcatagtgttatgaccttggtcaagggtttggtattaatatgggttgacccgagttattttttttatttactttctataaggttatcccaatctcatgacttgagtcataagtttggcagattaacccgggtaatatgtttttattattttttaattaatttttttcatttttattttttaacattggatttattgataattgaatttcataatttattttaatttgctttatatggggttatcatggtcttatgatctggatcattgagttgactaattaacctaaagttgacccgaatcaatctaatattttaccatttcaatattattttttaaaaaagatattgtcttgaatttttgtgaatcaaactatatttttactaatttttctaagatgtttctagattcatcacgttgatcatgtcatattagattaacttatataatttaaaatctttttattagaaaaatattagaaataattggatgtttctttcgcacgttaaaaataatttgatccgatccgtgacgcagcacaggtgaacaatctagtattaactaatttgaaaatatcttcatcactctattctatttatttattttttaaaaaattaaatatagggatgaaattaatctcaattaattaagaagctaataattagagaagggggacaccgcataataaaataatccacggtgggcaatcgcgttggctgtcgtcagcgtagttataacgcaaccttctttttttagcccactttcattcatctctctaccctatatctctctctccccttctcttcctcttcacgcatcctatccctcaacccataactactagaaacttgtcatatcaatcaaaacagcggcaccaccaccgcaaaagccagaaacaaa

SEQ ID NO: 136 - DNA, 3278 bp, Poplar sp.
aaaagttcataaataaaaaaataatttaaaactaaaaaaataaaaatattctaaaaaatacagttaaacaacaatactaaataccactgacatatcaattaaaattaaatcttattttttaaaaatatactttatacgtccgtgtcataaatttagaatattttataatttcttctaacaatgattgtagtcttcttttttaaaagttttttttttctttttttacaagaaagcaacacagctgaagggggcatgagctggcattttaaaaaaggataacaagcgtctaattgtcgttggatacacgttctttatccctgttgtcgagctggagcacatcattgatatttatttacatcagaggaatatcaatggagccaccagaaatatgtcaaatttattgattaattatagctcagtccttgtagtttataaaaactaatcaattactcctcgtacttttagaaattatacatttaattctcatgttttcttttagacattcttgaaggggaaaaaaatgaactgatttggtaaatgttgataattagattatttaattatttctactactatagagaccaattaactagttttaataaactatagttattaagttataatgactcttaaagctatgaataaaatttaaatgagtgagttataaccttatccttatatatttttcaaacaaatcattcaatacatgtaatttttaaaataattaattaatcatttcaccatatttgattgtcatgtcagggataataatagaaaagtcgatgtcaacataaggcgagcattaagttattcaaattcagcttcaataaattcattttagttttttaggtgaaaaacattctctcaaccaaattgtggttcgaatttttaatcgcttgaaaaaaatagaatgcaaacttttttgtatgaatgctatgattattggtaatttttatcatctttcatgtttgtctgataaaaaaataaaaaaaaatataatgatatcccaaaaaatcaaagtagttttaaaacaaggtttatatgttagtaattcgttaatattttggttttcacaatatgattcattctttctaactaagaaggttgatgattgatggttgatatctaattaatacttgtaaaagatctccaataataaatttagaaactctctaataattaaataagtgttttatggagagaaaagataatgatattttttagagagattctaaaaataaatatgtaattaagaatggaaattgagaacctagttcatttaaaataattatttaattaaatacttattttataaactcttcgatacttaaataagtattttcctgagagagaaaacaatgatattttttagagagattttagaaataaatatgcagtcgataatgaagatcgagaacctaattactttaagaatccaataagtctttatagcccatgctccctgtcatttggtgctaaaacatctctcatgtgtcaaaaagaaaaaaaaattctgacttatcaaggaaaaaatatttctaactcatcaaatgagggattttttgatttattagaggaaaaatatctctctaatttgttaaaatctcatattccaacaaagagtctgataagattgccaaagacatttgtacctgaactcaatgcttgactgagataaagggtaatgaatttggcaactcacaaaacttgtatatgtgtaggcttaatttttgaccgggcccgaggatattgggttattatcctgcctttaattcatttaaaaatatattcaaataaaaataaaatatgctgatatatcaaatttatttcaaagttccaagcggtaacatcaaatatctatggatcctaaacatcaaagtaatatgatggatccatatatcataatgaaaatttaatttatttagaaaccatttccaaaaaacaaaaaaaaagaaggtgaaagactaaataaaaggttaactcaatatcaagataaaaaagaaaaagaaatgggatgtgattttttttttgtgtatattgatatttagagtttatttagtagtatggttatcctgtattttgttttattcatgatcttgaaagtatcttattaatcaaaatctattatagttttacatgaattctattaaaaattctattataaaactttattatagaaacagcttttttttaaatttaattttttaaatcacaatgatagaagttactacaacgctcaaacaatgatgatgattgttgtaggctggcggttgagatgatgaatatacatgtgttaatttgttgatgagcgaggaattaatcctctcaaaaaaccgtaatttagagaagcatgggaaatatgcacgatttaattgggcttatttaagttttgcagggcttcttaagaactcgtttggaaacgcggttgaaaccgcgttcccataaaatttaaattttttttgttataatttaatataatttatatgttttggatcgttttgatgtgctgatattaaaaataatttttaaaaaataaaaaaaaacatttgtatacatttcggcacgaaaagttatttgaaaagcaatcgctaccacactgccaaacacactctaaaagtcagctatgcacatgtatatttctattattattatattattattatatacaaaaacatatcagcatatatgttttggttttctattgaaatgatccacaattttgggcaattgaaccaaactaaaactattttagataagaaaaaaaattcaaaatttaattcaagataaaaaaacaaataattagatgtgtaaaacacatgttttgagcaattaaaccaaaaaaaaaactaaaaatattttagattagtaaaaaatccaaaatttaattcaagaaaaaaaacaaataattatttcatctcagaaaatacatatagggattagttcatctcagaaaaagaatatatagggattagttaattattttttaaaaatttagcaactaaattatttatgtcttgagaatacaagaactaaattataatttacccaacttaaaattctgattccatcaaccgagagagaaaagagagtagagagagagagagacgcaaaacatagagaagcagcagtcctccattttctctcaaaaagtaaaagcctgcgttgaatagaagaaagcaagacccaacaatctctctgtctctataaaatcttgttctacccttgtcttgcctttgttattcttgcctcgaccgatccctataagaagaagcacaatc

SEQ ID NO: 137 - DNA, 1252 bp, Poplar sp.
  misc_feature (837)..(837): n is a, c, g, or t
  misc_feature (848)..(848): n is a, c, g, or t
cgaaatctatccaacaaggactatatttttcatggtttcttaagcgcgcaacaacaaaaactgaatcttttgttacgtcatcaagtgatctccttttaattttttgaatagaacacaattaaaataaaaataaaaactgaattttttttaactgggccggacccgacaataacataattggaattgcgatcaaatttcacaaatgctacatcattataatttttaaaaaaacaaaaaaaattaaactcattttcatggtttttcaaaaaaaaaaaaactattcacgtgattttaaatttaaaataatttttaaaaatatatattaatattgatgattttaaatttaaatattgtagaattaattactcctattacatcatgaaataaataatactttatataaaatattatttattattccattaaactatttataattccattacgtacaaaattcatccgataaggactataggttccatggttttttgagcgtgtaataaaatcaggtaaaatatcatcagaaacaaaattagaattgcgatcaaatttcacaaatactcctcatcatgcgatactcttttaatttatgtagtgttattaaataatattaaatattagtttttttagtaaaacataattttaaaaaaattaattttttttatcggatcagacgcggcctaataaattttgcttatgtgaatagtgaaaaaaaattcaccttgaacagtgccagatgaatgcttctcttcaccttctcgcattgcaggtgaattatcaccttggcactgttcactttttgagtgaacagtgcccaggtgaatttaattcacctgncatcacttggnatgggcactgttatgaacagtgcccagataaataaagagaagcagccggagagaagcagctcccagctgcttttgcaaaaccatggtttgatgggaaaaattgtggggcccatcaaatgaaaatctgcttttcttgcgttaccaaacacttggtttacgcggttagctttaaaagcagaagctaccgcgtaaacaaacacccacttagtcaacctgaagtaaattagtgcttccttaatttatgcagaaaagaaaaaaaacacagcacaccagctcgacttcattccaatggcttcgtctccaactctccctcaagattcaaccccagacccaaatactctctcacaaaaccctaacaacgcaaacccagatcaaattcaacacattacctgatgatgatgatg

SEQ ID NO: 138 - DNA, 3250 bp, Poplar sp.
tctacattatactatactttaaaataaaaacacttggctaattaaactagtctaataattatatgtttgtgtcctttaaagatattgaaaatttacattattattaattttagaacatatcatattaattaaaatacatgtaaatttatctaaatattcacattaataataataataataataataaaaatcattatacatgtaacttggagaaaaattcattatattataaatataaagtgtttttactttaaataatttagcatcattagagcattatttttgttgttttttaattaaaaaaaactgtaggggcattgttgggtctggtttgacagctaggcccaacactattaggtctggctgagccgtcaaatattttcaattttatttttttatctctttagattttttctttgctcttatttaattttttttcattcgataaagaaaaaataaattaataatattttttttatattatataaaagttgaataatgataattttttttatttaagattgagttgggttgcaattctttttttttagcggttatgctgccaccaggatttaatagtgttgggtccaacttccagtaggattttatagcattgagttcggttgtctagactcaacaacttttaaacttcttgattgttaggtccaatgctatcgggtcgtatgatttgaccactaaatctaataatattggatctgacattaccatcagacataaaatacataatatattttatatacacttcatatttttttatattttaaaaaaattattaatgatccgttgataagtatgggaaaatattctagtgtgtatgtatatttatataacctgaaagtttaaaggtgttaaactgtttttattactagttggtggttttgattggagatcgagctgcagagatcagcaatgtagactaagtcctcgtttattgtatggaaagtaatttttagaaattatttttaaattgtttttgtttaataaataaaaaatatttttaaatagaatatacttttcaaaaattataaaaaattgaaaaatatcttcaaagtgcaaatactgtctagataaccagttccgtctcaggtagacccctcaagccaccaagtgaacaagagaaattgtgagggaaacaagaaataaagttaaacaagaactgacatgattaaagttcagattaaaagattttttatttgtcgtttacttgatctaatgtggaaagtggaaatggagatagtagatagactcccccgcattaatgtatctatcctcatataaagtatgaataattaaaatatttaaaaatatattaaaataatattttttaaaaattatttttgatattaaaaaattaaaacaatttaaaaataaaaaaaaacattaattttaaataaaaaaaactcaaacactatttaaaaaacgttttacacgcatctaaactttttttatcacttaatttttatttatttattttatttaaaaaatttatgaaattagattttatttttattaattttattatctttcgatctttttatttgttaaatttgatttttattttttattattattttttattttatttaaaataatttatgaaattgatatttgtttttcaattttatcctccaacttttttatatattagattttgtccttatttttttaataaaattcaaaacaaattaataaattatttttagctcattttttcatgacataatcaaatattaaaaaatattttttaatttttttaaatattaaaaaataattaattttttataaaaactacttacgaaaagtaaattattctccagcaaacaagttcgacaagcaaacggtatccgagaaaacctctgtagttttgtcttggcttctcttaacattctttctaccccttctacaacgatattttcataattaaactaagaaataagtgaagacttcactcccttttcatgacatgtatggggttttttttttttttttgcatgagtgtgttctagtttaagatatattttttgcacccctggccaatacgcccactccccgatcagttgatatcatatgcattattgaattatattgcaatatctttaaactacgctagaaattaaataattgactttttgattaatatcaatatcaagaggccatgagtggatgtgagtaaaatcaggagaaagcgatgcagacaaattgcgaatccctcaaagttcaaaaaaatccatgttggtttcaaaaaagtccgaattatttttataaatcatcatccttataatagaagaacttacattttagtaatatatgccgtaattgttttctatacatcacattccttatactagaaaaactaacaatttagcacataatacataacatattaaatttttttaatatgtttgaatacttttttatttcaacgtattcattccctcatccccaaagtaaattattttagtttcaagaataatataaaagtattcttataaatctggttcatctgcgttcttaacatgatagccggttagaaattcaaatttattctctgtaagtgaatgagtaaattaattataaggtaaaagtgcctcagtgaatgactccatatccctttttttttcatgctttcaagaagagacatctggttctggtattgccacgacgaagtattactgctgaatggcagaagaaaacaaactcgagtcttgatgtagataacgctatcggtgagaaatcttgctgtggataaagttgtcggtgagaaatctcgaagtagataaagttgtcggtagggttttctgtgtgcgattgaaaatattttttaatcacttcgaagtgattgttcggcaacaaatgtgcattgtaatcgtttttgctattacagtttattttttaaaaaatattttagttttatttttagttaaaaaagatagattttcacatatagaataaattatagacaattttatacgtggttcaatataaaaataaaaaactatttagtttaccagatgttttttttattagatataaagtagaaattatggcaatggcaaacggtatgtaaaaatccctggatttttaccattgatcacgtgacatgcatcttgttgagtagtataaatactcttgagggaacccaatcaatttcaagttgaagaagtgctagatactagtagtagttgcagacaaagagctagtgttagacaggttcttgttagacagagag

SEQ ID NO: 139 - DNA, 3055 bp, Poplar sp.
gaggaactatatccaaagaacacacatggagaggaacgaaaatccaatttatgattattatatggacgcagaaaaggaaaacagagacacccaaaagtacgcagaaaatgataatcaggagaccggtgaaataaacaatcaaacagagagcaatgtgcaagaacaggagtagacatgcgatttataagataaacagaggtttcaaaagcataattccaaaatcgaaaaggtgttttacattgccctaaaagagtaagacctgtttccacaatatgcctatgacgtcgctctactgtgccattttattcatgagtgtgaggacaaatcaaacgatgatgaataccaacagtctaaaaaaatatggataattttcggtattcaccgccccaatcagtttgaacatattttatttttaatgaaaattgacgttcaacgagagtctaaaattgatgaaaaacagagtaaacatcagacttggcaacgagaggataataccatacatatttagtataagcatcaacaaagataacaaaataacgatagccatctgaagaaaaaagaggagcaggagttttgtgacccgtaggtcctaaagacaaacgtgatgattttcctaaaggacaactttgacattgaaaattaagacttttgttgttacaaatgatcttattttttgagattaacaattgaaaaatacgtgtagtaggatgacctagtcgacgatgccataaatcggcagagacggaagtgcagggagaccaataggcttgaggaactgacgtgacggaagacttggtaagggcatagaggatttcatgggtgttgagatccttgacataaaacacacgagggtgaaattcaaaataaacattattatcaagataaaatttctgaacagagagcaaaggtttcgtaattgtaggaacatgaagaacattagataaggtgaaagaacgatgtggtgtatatatttttgtatgaccgagatgagatatagggaggcccttaccatcaccaacatgcaaattatcattaccaagatacggttctgaagcagtcaaggtggcaagatcaggtgtgacgtgttgattggcaccggtatccggaaaccaatcaacagaaccggttgaggagagattgcgctacaccagattggcagtaggttgttggccataacctcgctgctggaattgagggcaatggggagttgtatggccgaaattctgacatagttggcagcgtggattctaccccctattgcgctgccaagagccctgcctattgtcaccgaaggaggagttttggaagctgcggtgatcaggtctagagccagcaaatcggttgcctctgctgttggactggttgggacgccagccaccgttgaagcggcccctgctgcggccagaattgacaaaagtctggcactgcgcaacaaaagcagaagatggaatgctgggtgtgggcagcagaggagcatgtatggcagcataagatttgtgaagaaattcatgtgtgaggagatggctgtgaagatctgcatatgataaaggtttagccttggtaataagactggtaactaagtctttaaactctccccgaagaccacgaaacacatataaattgaaatcttcaagtgaaactggccgaccagcagcggccaattcatcaaataaggccttcgctttttgcataaattgagttactgattcatcaccctgttgaagatcctgaagagagctgtcaagttgcataatatgagagttggaggtacaagcgagagctcgcttaagagtgccccaagctgaacaagaactttgacagccaacaacaagatgcaaaacttccatagatagggaggaaagaagagcacttagaatgagttggtcctgttgtttccagttttgaaaaagcggatttacctgaagagagataccatcatgggcaaaaacatgtgttgatggacatgtgttggagccatcaacaaaaccaaaaactccttggcctaggagataaggcatcatctgcatacgccaatataaataattggtgtttgttaatttgagggagatgacttgatgagtgtgagaaagggagataatgcttgcggcagtagaggcagcagaggcaacagacgtgggctgcaagaggaggcgttcaccagccatggcagaggagaatccaggcggtgacgcagcagaggaaagcacaggaggcgctgccagaaaagagggctgcactgttggagaagaagaaagctggactgctggtgctgcagaatttgaagatgtatgtggcggctgttccattgaagaagggaggctgggaggctgtgagaaaagtaggtttaatttattttagggttttgtggctctgataccaagttgagaataatgaaatgtgttaggttgtgccttagccaaccttcctatttatatagaggcagcagaacactgcagtaactgtaatgattacaacatcctatattaatttcctattctgatagatacatgatatacattctataataaatttgttgtttttttttcttcaactttacatcattctttaaatagaaaagctcaattaaatttttattaattatccactcaccatatttcattcaaggtaatttctagtaagtgttcactcatattatttcttttattattttaaatatcttgcactaagtagactcgttttactgttcttttaacaccaatgtaagtatcatttacccaataacagtgggagtttttttttaaaaaatacgatgtcaagttcttaaagtggcttaggaaagagtaaaactgactatggtgtcaagtttgacaagttttccgagaacctagcttgcaatactcgaagacaaagttatgagagaggtattgaaacatcaaacggcatccatgataggtccataatacagggctttcatgtaattgcattaaaataagctttgattgatttctatataaaggtacatgaggagcaccccaataacacaaagcagttgcatttctaaagtactatccgtctgctcaatccacttcacaca

SEQ ID NO: 140 - DNA, 3146 bp, Poplar sp.
  misc_feature (1899)..(1948): n is a, c, g, or t
tttgaatttaatctttccgccatgattttaaatttaatttcatccaattatgttataaaagaaaattaaagttgaaggataaaaattaaaaaaaaaatgatcgaaaaaaaaaagttgggaagtattatactatttatataaccagtgaagcaatcgtattaagccctgtttttttttttagttttgtagttaattatttttacgtgccgacaagtacatcctttgaatggctattcattaatttgtagtcaaagtccgagaaaaatacatatgatctatcaaaaccaaacaatagtgctctaaacttgttcgtttttcctgtgaggctgtgtgcatttacttcctcctaaatccatgttatttttgtttttatattttgaaaatgtttttgaaaaaaattaaattgtttttatttttatattttaaattaataattgtttaatattttagattattttgatgtaataatatcaaaaataatttttttaaaaaataaaaaatacttttaaatataacaattaccacaattccaaaacgcctctaaatcaggcttcggtttcgaaatcttatccaagatttatgtctgatacaaagaatactgttcaagtcacatcgctctataaacgagttaaagacgacagagtctagctcatatatatatatatatatatatatatatatatagtagacaaatcacaatcgagaaattagtattagttgcaaatcgtaaatgtttcgagcagtaaccgacatagcatagtttgatgaaataaactttgacctgaatggtttttttcttaaaataatatcatagtcaattacttatatatttacatgtcaaaaatctcccatcgcttctgagaggaggtgtttgatataattaatttttatttctgtttttaaatatttttttaaaatatttttggtttgaaaaattattaaattatttatttaaaaaaaaaactatattaaaaaatactttacactaaaatctcaaacagcatgaagatggaattaaaatgccatgtaaatatagcattgatattagacaaaaataggttggattggaagaacatgtctccttatctttttttcattttaaaatgacagtttcattaaaaatctgtcctaaaaacatatctatttttatacttttgtttacgtttccacgacaaaatatgttttatatatatataaagataataaccaatcataactaaaaaataaacaatttgccccggtggtttcgttttcttttcttttcttttctaattgtttttggtgatatgaaactaactggcctcatataccttgccagtgaggattaaatatttttttgtaaaaagacatacgcgattgtctggttggaaggtgactgtgaagctgatttgatgaactataaaaaacgagaaagtgagatttttgcgtattttatttcacctctcaataaataagccattcttaggagccgtgcttttcttttattattaaaaactattgtccaaaatgtaccttaatcccatcctaaatcactcgcctaggaacaattattaaagcaccttcactatctaactaattcccatggtggtccattactatctcgaagaaaaacaaaccggtaacatgaaagatatagctgaattagttagattttcttaaaaaattatcaggttgagtcttttaaatttcagaaatactagaaatttacatgattattaattttaggataatgagagattaatcgaggtatatgtaagttgatccggatatctataattaataaataaataaaaacacatttgtgcatgatattcgaggctcctaccaaattaatgtaattcgtgcgtgctggcatcaggtgcatgaacacagtacacctgtgttccatgatctcgaacnnnnnnnnnnnnnnnnnnnnnnnnnnnnnnnnnnnnnnnnnnnnnnnnnntgtcatttctttatatttctttcataaatagaatcggtaaaacgagtgaggctaaccaagattgggctctcagctggtcagaaacttaagttttgtgctggttaaattaaaacctagctatgacctcccatggacgtcgatagtttggctccattcagcacgggacagcttctctttcaggagtacagatttttgctagggcacccaaaagattggacttcaacaaaagaaccgggagtttggcacgagaccataatgatgacatagattgacgcacggcttgttatgtgatttcaaattaggtctaaaaaaatatcgtttaataatttttttttcatattttttctttaaatttttctttagtttagattctattaattagatctattttaattaacgattatttgaacaagtttatatattatttttcatgacagttaaaaattattaacattcaaaatttatcaaatcataatattacaattttaaaaattaaaaaatctgaatttcttaatttgtgattgtgtcggatgttaagccatatatatctctaatttactccaaataaatcgtttatgtggctgcttccaagctttgtctcttcaatcctccagttgttagtctgctatcttgtggaattttcagaatagaaataattatatcacaaatatatctaaaatcacattaaacgcgagcctctcgattattttccttgttccattacccatattttagtctttcacgcattctcaatcttcatcccagctttgatttccttttcaccttttttgatgctgaaagatgtgccacatctccgagtacaataattggagaaggcaaaagtagcatacaccagcagggccattgatagtaagagcatccactaaggaatcacaagagttcttacgaccctttcctcgttcatcccagatgattccgagggctctgctccactcgtacgttcctaaaaactcaatactgaccgtatacttatatactaccttttttcccctgcgtaaaataggaataatacttcgagaatatttgacccttccataaacctacctcggcctctttattcattactaccatcatatggctataaataccaaggccctttctctttggtttgcacgccaaggtttaaggtttcaatttgagacagtgagctccgttgcagtacttgtgttctctagca

SEQ ID NO: 141 - DNA, 3923 bp, Poplar sp.
aaaaataacgtaaattatatgatttcaatgccttaattttttccaaattcaattttaatacaaaagtttatttttgttattttttagtcactagttgagagaggtgagagaaaggtcgttaagtttcggcgatagaaagagaaaaatatcgttaatactgatttaaactatcaaaacagttgatatttatgtcaaatggttctatttgacgagaggagtttatatgaagtgtttttaacctttaaagttcatgaaaacgctgatatgagcttgatttttttttttgatgaatttttagtttttttaggctattgataggtttatcacaatttatatggtgtttttgtgtcaaaatgggttgaaaaatgaggtttgggtaaaaaaacataagctctgatttttcgaccactacaatggcaagaatctaggcaaatcatatgacgcattgtttgcttcagtaggcgacatgttatttgaatttttttttttaaattagacaacatattgtccaccccaattgcaatgaaaaaaaataagggcctaatcgcacaggccttgatgaaataggccaggcctagcagcgcttttttctttctaatttttctttctatttttttaaattaatgcttttttatatggttttttttctctaaatgtttttttatttatatttagattaatatctattctctcttttattttgtttagagtgtcttttttaaacgacgattatttttttgttatacatttaaattttaaagtttttttttctgattcatttataatttttttttaatcttttgtatagatgaattttatttttgaaaataaaaaaaaattatttttagataatatttataatatgtgaaccttgcatagtgtttttttcctttttattatattcaatcaatttattttttgtttctatttctattatcttttgcttaaataaaacattattttataaataaatttagctaacacaactgggaaaatatcctggcttgtgagattaaatatcttgaactacatttatctcttaattttttcatttttatttttggttatcattttttgtttttttttttcatttattaacacacatagttctcgatttatttgattataggtatgtataaactttttgattttcacttaaaattttcttaattgctaaaatgtgttgaaaaaacccgtgtatataattttttatttgaaaaaaaaatatttgacctgcggcaaagcacgagttgagtatctagttgtatgttaagatcacgttgaaatttagtaatgcctcatgagaagggttaacttcttctccttgcttcttatactttatttatttttctataaattactagagttatcccttgatgataagtctctctatctttttttttaagtgtataacattcctcagtcatgtccctttatctttatgaaaaaaaaatatttttagaatttgtttaccaacatctctttttattggtgatggatactggacaaagtcttttcctttgatagttgttagtaccttagttttggtggtatttgaaggattgattattaattcatgatatatcaacctaattcatactagacttttaggtttgcctttgaatacacgagaggtgacaggaggtcgcttgtgttttggagacttatctctttgtttataaaaacataggtacttttatctagctgcatttgtttctttcatcaaaatatgatttttttattactagttgattttgagaagagatttatctaagagagcatataatctttcccataagaaatagttatggattcctctaattagagcctttgtagcaatcggttcaaacaagtattttactttgagcatctccttactgaatctttttaaatatatcatgatgctttcttcttctcattgagtaatggtgaaaagcttagtttaactttttttgacagatatacttgtattaaaataatcaatcaacttcgtatataagttgaagaagttgagtatagaactagattcaaaactatataattgaatttaaaatgccagtacagacaaatgtattttgattatagtttacttagcttgtactgatttgttttatacatttatctaaatgcatctaaatatttcatttccaaatgatatcaaacatctatttacatgcctaagaagtaaaaaattattaccttataataatgtgattgatataactaattaaaaattcatcatttattggtgcatatacaaaaaaaacataatacaaatacaatattaattagataaattatttaatcatagttattattaagttcactctattttactatttcttttcgctaatataaaatttaccatacataaccaaaagaaattactatcaaattaaccacaacaagaaacactataattagacttgacttgcccttataagttgacttagaaaatccatgattgaagtctgacccgaaaaatacattgacatgataaaacttagttaatctggtcgggtcggttcatgacctggttgatttagccaaatctaattaggtcaactccatatttattttaataataataataataatattattattttagtaaaaataattgacttattaacatgtgaaccgaggcttctttgctaattagcatgtattatatcaacataataataaaaaaaatacaaccacaagaataaactaattaaagagaaaaaacaaattagccaattccataatgggatcacaagatctaccattaccaaactatacctacgtgcctcaccacacacaaatagcgcgtggatggcaagacattttgaaaaaaaaaaaaaaaaaaaaccagcagtaatataccttgaaaattaaactaatagaagaaaagaaaagagaaacacatctcacagatgtaccaagttgcagagaggagcagttccctccctctataaataaccaaaagctcaaacaccgttcttcgtgtcaagctctcctctctctgtctctctctctctctgttatattaacaaaggaaggaaggaacaagtctcatcacctttcctgttctatctccgtaaggtaaggcggttccttttatttctcctcttccttcatttcccatgcaattataatccaacaacaataagcacctgacagccccctattgctttcctttcccccctcttcctcttgcgtttctttctttctctttaaacgtaagtttcaattgaaacaaagcgtaagtagtatacaagatctgcttttactgatttgtttcatgcaaatatgtttttttgtgttttctctcatgcccatttagactttaacgatgtttgaagtgcctgattttttcccctgtcgttctgggattcgttgatctcattctgattcaatcttttactttattgcattggatctgatttgaagtagtaagtggttttttttggtagtggtgtttaagaagaaaagtgagaatgaatgcacgatacatgggttatgcttattgtcgatagagcaaatgataaaaacagacaacaagttatgaagtttcaatcttagaggaaaccattccttaattcacgtattagaagttgattgcattttgggtttcatttctttgttgtgtttctcaacatttgttgagtgttagatctgtatttattgtttgctactagtgactgcctgtcttgttcaaagtagctgaaatttgttccaattgaaaactgttttctatataatgaacaaagtagcggaaatttgttctaattggaaatcgttttctatgtaatggaccggattagtttttgcagcttaattgttattttagagcttaattttgatagatctatgaaagttgaatgtttggatcaagaaaaactgaatcttgattttggtgtggcataagaagcagaaaa

SEQ ID NO: 142 - DNA, 3115 bp, Poplar sp.
ctatttattggctgcaacaattactgccagttttaggcaacagcttaaaggaaaaactgctgcattctgtcttgaaatttagtccatgaaattgtactacaccaccaccaccaccaccagtcattaacttacttgtatacttagtgttgtgtttggcaataatatagctgattgttattttgataaaatttaatttttttgttttaaatttaatttttagtatttttaaattattttgatgtgctgatattaaaaataaattttaaaaaataaaaaaaatattattttaatatatttttaaataaaaaatattttaaaaaaataactcatgtccggatataaaactctatttcttattggttattgtttgagagaagttttctcttttcttttgggacaagttaatgaaaaggggttggtaattagtcttgaattaattattattattacttccacattagtctaatttgggtgatctacctataacaaccacctttataatttcaagacatacatgaccccctctcttagcatcgccatacgagaaaatcatgaagtgcattgctctctaatcatgcttcttcttttttaaacggttaaagatgttcttaaactaatttgtgtgttaatagagattaaattttttatcctaatgttttaaaaatgtattagcacgttactaaataaatttagagatttgaattttcttaacattaaatgcatgcttgtttgtgtgatcaacgtgcggtttgtcgtataaacaaatgaaccccaagttacctctttaaatttactattagtaaattgtttgggtatgaaaacaaataaaaagtaaaatcaattggtttagagacgtgagatactgttttaaatgtgttaatttaacctacgcaaagataatatttctatgatacaactaaactctttaaagctcttgaataataagaagaaaagacaggtaaaaaatatattttttttctatctgttttatttgtgtataacaagtttatatagatttgaaatattatgataagattatataactgttaaaaaaatggttatattttaaattaagaaaataaatgttaaaaatcattataaaactcatctatcatagcttcttaaaaagataattatattttgaattaaaaaattaactgttaaaatttattagaaaaacccatccattaaagcttttatttaatttactacacaagaaaatatttattttcattgtagatggatttgaaaccacaccaacatttgcttcacttttatttaaaagcatcaataggtctcaccaatgtaacgttacacttgcagcagtacaagtatagtggttcctcgagtcgtttaaatttcaaaatggtcaggttggttcgaaaagcaagacactcaattggttcggatcgagatctatttctctgtgacccacttctttggtgacgatgatgatggatcatgagcatgctttttaatcgcctagtatatgttctacattccttgctgctgctgctgctgttttctttttgggcagcggcggcagcgcagcagcagcagcagcaatctagctagctagttgttgaatttgaggtaggggctaactcgtgcaaggatcgatgattccatcaccttaaatgttgtcaatccctatgggaaatgaatgctagacgatgccctggtgaaatcttggagagccctggattcaaaataaatcaactgaaacccaatcacctgccatcatcaactgcatggatgtatatttggattggaactacagagaagatcaattctcttgcattgctggcccagagctgtcaagcgtgtaaaatataataggtattgatcttgacaaagtaccaacaagttaggttaaaattaggtgcatatctgaagcattccttgatgtttaacgtcataggaatgttcatatcgtgacggttaaggtatccctttctatttggaatttaagcaaaaaaattctcagtttcatcaaattaagtcgacatcgactcataaattccctcaatgatatcattcaagcaagaacaacttgttatcgtcaatcgacatcacaccaaataattacgataacgaaaaataaatttgattaattagctgtactggacttggaattaatgcattcactgtttttatcggggaaaagaaaaggacttctagctatataatttccagttgtaaatcatgaattagcctagcaagcaggttgatttaatacctcatcgactccaagttaagatgagtttaagttaaaaaaataaaaaattccagttgatatgttgaaatccagttaaaatctgtttcttctttttacaaaatagtattattttgattttttttatgaaaaaggttaagttaactcgggttaaccttcttgaatcaccttagctctgaattgatttttaaattgatttttataattataataaaattaatataaaataaaaatagagagaagaaaaggttgatatctaattaatatccaatttgtttaccttgaaaatagaatttacaagattttattcttcatttaagatctttatatatatatatatatatattacaaaaccttaataatttattatcctttcaagtcatgccaatgatttaagaccatacaatgactcaaaccatgttagcaagcaaccacatgaaaggtttttcccatcaacaaacttgggaaggccaacaatttcttaaaagaaaaaaaaaaaaaagagtatatttcccacaacgttgaatgaaatcattcacaacccaacaaaaaaaaaaaatcaattattaattcaacagagagagagagagagagagagagagagagagagagatcgaacaagacagcaaaatatggagacccacaaaggaacattggacagctgtttggcaacccttgtctttgccaccctgttctcacacttctcttcaaaatctctctttacccctttatatatgcgcacccacacccacacataaacacctaccatccacattcctacaagctgttgtctccattctctctctgcaacttctctctaaacaaatctcatttcaaagaggaatcgtagtctttctttctttgctaaacaacaagaaa

SEQ ID NO: 143 - DNA, 3073 bp, Poplar sp.
tttaattgaatttattaaagacttaattgcaagaaaaattgatttttgaagtcaatttaggctttaattggaagaaattaaagtctatgggtcgaattgtaattttttggagttaatttggtcagatcaagggtttaattgcataaataacaaagtttgactaacaattaagaacttgatttaagaaatccaaaaccaagaaccaaactgaaaaagacatgtgaatgtaagggctgaaattgacctaattatgggttgaattgaagaaattaaaagttttttgatcaattgagggtcgaaatgcacaaattcagaaccaaggattaaaatgaaaataacagtcaactttagggctagcaattgagtttggcaagggtgaaattgtatgaaattaaaagtttggaggcatttataggtataattaaaagcaattgaaagaacaattgcttaattgaagtttaccaaatcctaaattaagaaccctaaatgactgttgttcagacttaatgaagagaaggtgaacgacacatcattcatcagcttgaatctctattttgacagttttggcgggtcgaatcgacaacttcaaacgaatgaatgtggagttactaacttttaaattgagcaaagttggatctaaatgaaaggtgtgcaccccctctaccaacttcaggtggtttcagaagatgacgattgcataattgcttcaataagaccttgaaaatggacaactcagtcaaccctgacaatgcaacctaatgcaaaaactgatttggttttcgtgtgttcatatataaaggctccttatgggttcttatcaagggtttacatcatttccctcaagattaagaggtcagaaatggattcaagacctcccaaaaccctagaaataccttcctcaaataaaaaaaggctgaaaaagaggggaagaaaaaaagaaaaaatataagaaagggaagaaaaatatcaataaaaaacataagtgtagaggtctaaaagcctaaacaaaagttttcttaagctttgcaagtttgtaagaggcaacattttccaaagaaaagccaagaaagagtagttgttctaggtatacattgttgatccaaaagtaggtcctttgtggactgcttttgttgttttatttatttatttggttttatattcatgtttacaagcatagaaaagaggtttgaaatgtttaacaaatgatgttgcattcacctcttcgttgctatgattttatttaaagaagctattttgaagtgttttttttaatgtttttgatacatgaaagttattatttaagtttgtttttcatatacaatattgttttagttttgtttaacttaagctatgcatgttaaaacaatggtgtttatcctcggtttactaggtctgtttatgcacctaatgagttcaaaaaatcaattttgaatccatgttgcatgaacatatatgttgctttaagttgaaagtttttttgatttggtacctcatgcttgattttgatgctttgatgttttttttttagttagttttttggttcaaacatgtttgtgtatgttattttgaattcttgagataaaaagaacatgttttaaaaacaaaaaatgcctggcttggctaggaacttttctaggttttttaggcaatgttctttgtgttcttgagaagaaagttgtcttagcctataggttcagaccaatttcggtcaatttccttgcatataaccctttcttatatgattaaccattaatccagtgtttatttgcatcaataacatgattttaacggtttttaatcctagagttttggtttagaaccgaaacctattttgataaaattgttatgtttaagtgataatcgaagtaaatagatgtcagattaccgatccttgcatgatttccaacatgtatatgccttcgttttgatcaaatttggtttgttttggatttcatgttgctgggtttgttcgattttcttgactgttcttggtgttattcatttttttttgtgtttgattcattttgctcaagttcttttgatttttttttaatgttcttgggtgttttattttttttttgtttttgattttttttttgggttgttttcgggtcaaactaggatttctagctcgatttatggtcaaaccaaaaatctcgggtcaacccagtcgagtcaacttgatcgagtcaagtaaaaaaaaatgggtcaaaggttttaataccctatttggtttgccataaattttgttaaagggtttttgggttttagggtgtgtttggcaaacacccattaagctatatttggtagttttattaaaaaagaaattgagtttttgtcaaacaaagcctaaaaaaataataaaaaaatattttttttcttgcatatggctaaaaatcctaaagttatttaagcttttattttttaaaaatctaaaatattttgacatgtttttttttaaaataatatatggattttacaacaagtttgtaaaatttgaaaggattttagtctacattttaaaaataccaaaaatttttattttaatatatgggattatgaacttatacgaaagatatattcctgatattaaaattaaaaaagattttttttgtttcttttaatatacaagattatgaatttataagtaagacatattcctgatattaaataaaaagatagtttatttttttatgctggcattagaacggttttgtttttaatctgataaaataaagacatccttactaagaagtacttttcttataccttagacacacaaactcttattctctttttttactgataaagaacaataattccttgtccttttcacccacatcattctcgacgatcccgatccgagaggatgatcgccgtaacattgtacaagtgcaacaagactcatcaaattgattagatcacatcaaatcaattcccacataatttgttttcaaaacaattatattaaaaaagtattagtagcacctagatattttcggtggtggtggctataaataagagtgcagagaagaggcaatatccattttaaacacaaagtaatatttccaag

SEQ ID NO: 144 - DNA, 2537 bp, Poplar sp.
gagttgaacaaaggaagaaaaaaagaaaaaaaaaaagagcaaaaaagcacaaattcacagagagaaggagagaaaagggaggagcaacacagagacaagaattagccttgttattgtcttcgtccctgcagaaaaagaaaaacccgaaatcaattaaaaaaaaactcagagaaagccggcatatccattaccttcttagttcgttcatctcaagaactgagaaaacaaaagaagagaggacagtgcgcacagctaggagataaaggaaagcagttgaacgaaagtcaccaccagcattgcagccatcttcgccatctccagaagcaggtgcgccatttcccttacattctctgcattcaacaacatttgaacactgtgcaaaggtaatttaattaccttcgcactgttcatgcacgcgtgcatccggcttttgcccagccgggtcactggtttgggccagtgaccgggccgggctggctgggtctagcctagcccacatgggctgagctgggcccagccccaaaaaataaaaaataaaaaaataaaaatatttgcatgcataaaaaaaatttattttgttggtttattcattgatgtcagagtcaagaataaaaatactaatttaaatttattttatttagtcacataaaaaaatatatgtgcatgtataaaaataaatttattttattggtttattcactaacaccagagtcaggaataaaaatactgatttaaattttttttttttttagccacgtaatatttatcaacgccagagttggaagtatacatagttgaatactcattgacgccagagtcaggaatattacaagcaaaccatcatagcataaaccaacaaacttttagcaatttcagatagaactagcaatgcagcctgcctcagataggacgtttaagggtgataatatctttttttttacgtaaccagtcccgtatcatagaatctctgctgaccacttagggttcctagtgaccataatattaggtggcgactccttaaacaagaccattccccattaaaaaatagaatgcaaaaaatccattatttccattaaagatatttttaaggtcgtcatgatgttgggttcaacagagctaggtttactgagactccgttctcattataaaaaaatagaaagaagttggttcctagacaaggtgctatcctaggcttagagctgagctagacccctacttcgtaatgatttagagagctccgaatcaggctttcagggcgatcagggcaaaagagaaagtccaatctgaccctaagcagatgcttttgacatcttattcccattcgctttcaggtttgacattagagctctcgttagctgttcaaaattaagctgattgacttaaggtgaggaattcgagacttttaagagaaaaaaacactattgattaatatttaaaagtgcatttttattaaggctttatatcatcatattgcactaaagtatcattaaattccctaactaaagcatgttttataataagaaatctgataatatagtatatctttaatttatggtaaatgtttattttgaatgcaggtatatctcacaattcaaaggatggattgatatgattaactattgaaagtgaagagacaaaaagaggactaagctaagagaagagatgctggtttaattccaaattggaacaccattcggttattggatcataactggagttttagaccttagatttaggtctgttttatatggatggaaagctaagacatagatctaaaacttttatgggagtccaagaatcaattctgctgttttcaagttcaaatcttagcaacaacagagaagtcagaatctatcctgcagctcagacattgttcggtgttcagctcatatcttgagttctagaagtccaaatgagctctggttttttttgttggaaatctgagacaatttcccacaactttgataactacaatgggctctaattctgatgttagcaatgatgttttggccagccaacaatatcaataactagccgacaatgtcaataaccagccaccaaatcaatggttggccaccaactaaatagtttgtcaaccaatcaatagtttcaaattttagcctataaaaggaggcatttgccatgtatttagtcatattatttttcagatcaaaatcatcttcttgctttctctctttgtaatgttcaaattttctttcatgctatattaatctcttgtttatgcttttttcatttcctttcctatacttagttaacttatatcatgtttatgttcttatattgtttatttatgtttttcttcttcagtttatgtttagctaagttaattatgtcaaggtgaaaaggtttcactagtggtgttagaatatgtataatataaactcaacatggactttaatgtttatatcaaagaaagattgttattaacatgttttatctttttatcttactaatttttaataccttgcttgttaaatggttaatctagatttgtgttatataacacttggtacatc

SEQ ID NO: 145 - DNA, 3334 bp, Poplar sp.
cgagcgagttgaatatatcatgttgaaataattttttatataaatatttacgagttgagtttatattactaatttttatgaatttatatttttaaagacggacctactcacctacaacatagactataggttccatggcattcttaggtataatttttttacattataccaccattaaattctagctacctctcccatctcggcctctagtaaagaaataatttttttttgttgcgttaaagaaatttaataggaagtccattgacaagaactttcaagccaaaatatttctaaataaaataaaaataaatgctcaatttataaattatcaagtataaagataaaaggagtattgggtattcaggtttggttcggattgaccgggtttcaaaaattttgatccgtcactcaaccctttatatatatctatttaatttttagattttttaattcaccatcatatgtaatatctatattatctgactttgatgagttgaatcgagttagataatataaatattacagacgagttagtttttttaaacaccgttgctgatatgacaagttgcttcgtagaaatgtttgataaggaaattaaaaatgaaaatatttttgggttttcttcaatattatgtctaatcatatgtataaacaccaagctgcaatcttaatttagtaaaataacatttataaggttaataattagtagaaacgttgactgtcaaaattgttggatattatacataaaagaattttcaccctctccctttccttttatgaggccagaatctttccaactttgctatgttttttttaatttttagattttaaatctttttttgccaattagagcatatgattgacaattattctggtcaaaatttgtgttagtctacaaaccgtagttataaaactgacataatctaatattcaatctacgggagtctaggactgcctcaatgaccgaatgaggtgcatctgttgcttaattaacatctcaaaaatgcaaatatttgaaaaatctacatacgatcaataattagttgatgacagtgattattattattattattattattatttattattattattattattattattattattattattattattattattgcttatgcaaattataaatagatatccctctttcattttgagtagaagagctggctatttaattttaggtagagaaaggatctctctgaggaaaaaacgagtagaaattgaatcataataaatattgtacatacaatgtaaactataaagtccatgggaagcgacaaggatctcaatattaaagcttctgccaccgatttagagctgtcgacagagatcgatatctacaaattaaggacagttgatcaatcttcgctatattaccctacgcataaacaagcataccaacctgcatcgatctctcccatggctacaaaatattttgtcaggtaatattaggtgtcatctaccgctaatgaacaacgtattatgtactaattaaatctaatatttcataatgtctcaaggtatcaaataatagaaaaaacttgcaaaagcatcaagtaccccaccattaactaatccctgtttcttgtctccctctccttgttcttgttcaaacataaattgtaatgaagcaccccatgtgcatgcaagcttgttgcttatatttcttcctgttgctgttaatttccccccttcttatcttgcatgagtggatattgcatgtcattcttcatttgtatgttcaagcatcccatcgatgtaattattctacaacgactcagcaactcaaaagaccataaattaatctataattaatggaatgtaatcccttaacttacaggaagagtttactggtttttcgaagttgatctcctcaactataattaggtcagtcgagttaataaacttgcagtttaacttacatctatctatttataaagtatttaaccccaaaagatcgattggtctatcagcatttagctaagggcttgggagggttctcaagttcaaatcctatcagtattaaatttgttaagatcatgactataaaatttaactctatataaaaaagctagttataagatgtaaagatttaatgtgatgaatgcaagctgactcagaatactttatattttaaaataaataaaaaagagtattttagcttttatccacaactttttaaatgaaaaacttggaaattgttttaatatatacacatctcaaaagaatattaattataaaaacagatatagatcatttatccaacatgaaatatttaataaatggtaattaattaaatcaccaaattaaacttgattcaataaaatatgaaatcaccaaagagacatggcacaaacgcaataagtcagtcaaaaaatcaaagattcatgaaaatggaaaatggcgatgaatattgtccacgttgtgagagttgttgagtatcatcgctatagactagacagaggtgtcgaatcaagaggttgagattttttatttttgaaaaaagaagacaaaagggttagtcattgacggcgtgattgaagtaccagcgaagccacgtgagaagttttgagaagccaaagaaacatattttgttacagatcacaatcaacgttcgagtggggacccacttataatatttgccacctttcattgagattgattgccaactggcaattcccccacacctctcttccctattttgtccttcccatgccatgcttatttacaagacccacccttgctttcaatcattctcggccaaaccaaccctaaatttgtggacacttatagccccgcggggatgaccttgtgatgcggggggggggcaaagggctagagagggtcatttgcatggtgaggttggcttgcgtgcattaataacaagttggtatgtttcggtaattaagttggaaaacaaggggtaggtttgttgcaagcatgtctatatgatgccattggccttaagcatgatgcgagacaattggctgtaacagttgcgttgaggtggacacgaggatagatagatagcagagagacagagagtttgaaagtaagtgagaaagatgcgcacagattcttttggctgattcatcaactttgctcctttcttctctacttgtatgaatttatgtttgactcgtaaatatataattcatgatatttctttcatgtaaatcgatgaatatgtttttttttttaatatttttctttcttaatatattggatagagtttttgatcttcaacctcttgattattcatacttgtttcttttccggatatacagatttgttgagtacttgagacaagagagat

SEQ ID NO: 146 - DNA, 3258 bp, Poplar sp.
cccggagaagcaattgcaagacaatccatcggtttttgtctcgtctttttctcttttccttgtcacttcaaaagtatatatatatatatatatatactggagaagctagtgatctgtatccatatctattatcataaatatccttttcaacatggattgttctttatatttaaatgttttttttatatatatattttctcatgtaagaatttaacacacccacgtaaaactaaggaaaaatcatgtaaaaaaataatcaatatgtgtgttaaactttgaaagactaaaataattaagattttattagactttttataaaaaccaaggtctaatgtgctctagtcaggtgttagccaatggcccgtccttctttatatttagttgaattttatatatatatatatatatatataatagtaaaactattgcatttctcaagaaaagttatggttatgataagtcaaaatgtatatagccatgtttgtagtggacttagaattaactaattatattatagctaatgagcaggatggagccaaaaaataaaattaaagaaggtcaagatttcaattgttttactatttgaactaaaaatataaatattgttaaggaaaggaatgcaaaaacaatttccttgcagggattgggcctcctgctagcccccatgtctctgccactactaatgaacttgtagtttaattcacagtaaatttttatttcattaaaaaaatcatatcataccccgtgtaaaaaaagagtgagaagagtctctgtataaaaacaaatatttaacaagtttttgaggatgtttgtgccgatttttatatttaggaaaagaaaatatatgaaacttaaagaaaaagaaaaaagtattcaaaaatgtatatttaacaagtgaagcttagaataatctttatttcttacttgaagtttttttaggttatgttggggcaatttttattttataaaaatataattgataaatatatcttatttatttttgaagttatttttgtttagtgagcactttaaattattgtttaaatgacccttaacttaaaccgattttaaataaaataacctaaatctattaaataagggaatctttgatttaatttcattattttttctctccttgctagtcacatgcctaaagagagtggctttctatccacttgtgcagaggcgtaaggtcccaaacagcatcaatcatgataccccacctacccaacgagaggcttgaaaatgactctttttttctcaagaaagaaaatctttttttcgtgatgtgatgtttattgttattttttttatttagatatttttatatttttttttaaaataaaactaatttcatttaaaattcgtaactgttctttctgataaatatatatttattaaggtttcgatttcctatttatcattcaaataaagaaaacgtagtatttaattttcattaaatagtttatttataatgatgactttttatttcttttttattgagtaataatagacgtttagaaaggctaattatatttacagtagaaacattgagtatacacaaacttttatggagacttcaaaaaggcaatgaaagaggaagtgtttttcacagtggtttgaaacccggcccgacccggggctggaatcgggtcgggttgataaaaaaattgcataagccatgacccggtgtgacccagctgaccctgcgggttgacccggtgacccggttgacccagcaaaacccggttgcaacccgttgatttttttttttttactaaaacgacgtcattttgaatttttttaaaaatagaaattgacccggccgacccggtcaaaacctggaacccggaccttggaccgggccgggtttaaaaactttggtttttcactctgtgttttatataacgctattttaaactattttaaagttaacatatcattcatcataagtaccttttatcttttttttctttcgttaaaacatctcactcttatttttatttgtagaattatttatattttaaaaaaccatccgagtaatgaatttcattttacatgttacatgttaagcttttgtaatttttttttttaatggaaaccgaaaataaaataaaaaattccaacccattttttaatggcacaatgaaacatggtaaagggtgagcaaaaaaactggaaaatcaattaaaccgagaaaaccggaaaaaaataaccgaaaaaaccgaaccgtgaaaaaaaaccgattaaaccgattaaaattttgaaaaaaccagctggttcggtttcggttttataagtctgaaattgaaaaaaccgaaccaaatccaaaccaaaaaaaccgagccaaaccgaaaaaaacgagccaaaccgaaaaaccgaccaaaaccggtttttgtcctaaaaaaccgagccgaaccgaaaccggtcggtttgaaccggtttcggttttttttttaaatttcggtttggttattgtttttgataaaaaccgaaccgaactgaaaataatcacccctaatagtaaataaagttgtttttgtattcattattttttttaattcaataaagcatgaactcaaagtcactatactctaagctagcattactcggtggtgcattatttagaccttttttttttaattattttggtcatatattttaggtcatgttttagtaaatttaacttaatttattttgaattattatcacttgaatatcttattttcatgtttgcacgcggtgtaacaaaggccatatctatatagtttggaaaccagaaagaaaagaaaaacaagcaaattacaacgataagtgagaaatcagttaacaaaagaaaaaaaagatggaagaaattgtcaaatggaccgttaaagcgcctagaaccaatgctaggctaaagaagatttttaagcgtggggctaacatcttccctgaaaaatgacagaagattcatgataattttacatatatagaaaaagagaaatgaggttgacatgagaggaggaaagatggccaacccctacctccattatcaagattccttcggacgtttcctcgagaagagtgtgcttctctcatgccttaagagggtcccacaattgcccttcctcttcatcgcagccattactgatgcgctctctccttctataaatagagcagggcttgaagatataacaactcattaagctacacagagaacacattcatactccaagtcttttagttcatccatttaagcttaatcaatcaatcatc

SEQ ID NO: 147 - DNA, 3079 bp, Poplar sp.
ggagacaactacctagaatatgactaggatgaacatgaaactaatggcctgtgtcgagagactgtgtctggctataacagcaataacaatgccttggaagcactcttggactatactatcaaattacataatctattttaagatttggtagtactgaaaggtttaatctcgatatataattaatacctaaccaagtggatctcaccacaaaattgttgaatttttagttttttttttgtatattttaatgtgaattaacatacatcttatatgcaggaatatattaaaattctaatgtttacaatttacatacatcaaactcccaacaaattatgtcatgtttagcttaaaaaaaaaaaaaactcttcatctccatttttaatttatatgtattaggatatattcaataaaaaaaatatttttatatggatctccatttccaattctcttctctatcttcaaggaacaattaggaaaaaaaaaaaattccacacggcctcaatttcatgatgtaaatctatgaaccaagaaagcaccacatatggatccaggatggatcattaacccaaaataattttgttttagtaattttttttgaagaaacaatctcatcttataaaaattaagtaaaaaatattgaagtaaacgtggtcaattctcgcctggattggctgaatcaactggatcttctgaactagataagatttaatgactataataattccaaccacaaaaaacatgtgcttaggccctacagcctagctagtcatcaactgcttaggcttcttgttattatttttctctcttgagataagtgaatagacttttcaatttatcgtgttttccaagtcaatttggtgtagcagattcccttttggaaatcaaatcaatgtgttgattatcatcttcatctttttttaatttatttcttgttgcttgttccttttagctacgcaactatcacatgatgaaatgcatcgcttctcatggattgtgtcggaaccatccacccttctttattaacatgcaagtatatataattcctacatgcacccaaaaagaaaaaaagaaaaaaaaaggggaaattttatcatcttgaatgttgttttgttctcctttctttatttttttttattgatgttaactcgatcagtctaaatttgatttagctagttagttgagttgtaaatctgtataatcaagttaatcaggtttttcataaatcaatattctttttaatttatttaaaatcaggtaggttttttttatttctctattaaataattcttaattttttttttttagtttaacgtgggtgtccgggccagcttgcgcgcacctcaactaatcccacgggccctgaagttaacgaccatgtaagcctccagtgaccatcatatgagcaaccacaaggctcgaacctgagaacacaaaaatttttaattttaaatacatggaaatagtgcttcgaaacaaagatgcatactatttactattcatgattttttttcgtggatttaagaaaataatcagtggatttagtgtttccctaataaggacttttcaaatataaaggactaaaatgtaagatctctcaaagttagggatgcctcggcctcctcgtccttcaacaccattttccgcccctggggttgagagttatttgaaaacagttggaatcaaattgataaaatgcatatggtttaggatctaatcaagaatgagtaaataaattagggactaaaatgagaaatccccgagaaaaaaggctgtaaaatagaatcgctaaaaaacaaagaccaaagtcaagtttccactagccaaataggatcacgtttaatggctcacgtttcagcacgtgactgggacaagtatgaaagcaaacaaaacattatttttatttattattattctatattcattaaaaaaaaaaaaaagacagtgaggataccgacaactctggatccaatgcttgattaatttgatttattaattatttgaatttattaattatttgaataaagcttttcttagggaattaatttgaaagttgattggttaggttgtatttcgcataaaattaaaatttagaagagagtttttacaaaaaaaacaatagtttccaagataattgttaaaattgaaaaattaatttttaaggttaattaatgtgttaaaaatgtaaattaatgtctctcaaaggtaaaatttcacctaattatttttaaaataattttggttaattatcatcctcttttaataaattaccctctgctaaattctcccacttaacatacacttacctttaccaaacatcttcataaaataattaatttttatttttatttctgagaaaaaatgaatatatatagttaatgatataattctcgtgttttcacattaatgtaaataactaaaattaaaatttaatatatttttattaataaactattatcataacttaagtttcaaatagattaatggaatataaataaaatcttgcactataatgatgaagggaaaatgacataaataattatgatgtagatgaatatgttatcatcacttcattaagtacaaatttactaacaaaacaaaactaattattttgtaccgtagagataagtattggccactaaatattattaaatatttaagagtttgatagcggttatattttatagtgtttttgtttaaaaaaatattaaaaaaatatttttttatttttaaaatttataaaaatataagatgatatttaaaaatatggtttcagttattttttaaaatgttttttatttagaaaaatattaaattaatacttttttatttttaaaatttattttaatattaatatattaaaacgattcaaatcattaaaaaaaaattaaaatttaataataaaaagaaagttaaaaatcactaccgaatattgcctaatcagtacaaatctcaaaccccgaggtggactaaaaaatatataaataaagggtccctccttcccattccctcactgtcaacaacacatttccttcaggcttcataattctgcaaagagagaaaagacagatatactctatca

SEQ ID NO: 148 - DNA, 2746 bp, Poplar sp.
ttgtggtttgaaaaaaattgttttataaaaagtatttttagttgaggaagttgttttataaaaagtacttttagttgaggttgatttgaaaaaataaatgtttggttaaaactgtggttgaaattgaggttgaagaaaaagtaatttaatgtgttttgttaaaaatgcttttaaaattgaggttataaaataattttaaaaaatatatattaatattgatgatttttaatttaaatattgtgaatttaactattgttattacatcatgaaataaatcatacttaatataaaatatttttttattattccatgaaagcatctacaattccattacgtacgaaatacatccgataaaaattacagtttccataattattttagtgtataataaaattagataaaatattatcaagcattttttaaaaaaatattaaaaaaattaacacacttaaaaaaaattaaattcgcggagtgcaaatgaataatgcgagaaaattgcactgttcactattttaaagtaaacagtgcaataatgtaccaatatatactgtttatattaattatactgtttattaaacagtataattaacattaacagtgcaagaaaagcaaaaaaaaaattgcttgcacagaagataaggtgaaacattaaattttcatgggtcccataaccaaaacacagttattaaaaataatcaaacatcaaattattgcgtttgataaaaaaagcagaaggtaacgagagccaaacactatcttaatcttaatcttatgtagtctggccatcctcttcttatccaaacacgtgtagccagtccattggaagcttgaaaaatggatagatgagaaaatcacgaggacttttttggacaagcactacttttctctcctcttttttggtgcatatgtcagtggttgttgtagtcatagacctttatgttgtcgcctcaccggaaagtacacaatctagacatcggcaaacacatcctctaggaatagccattttgctctgggcactgtgccctttaaggagttccttgctttaggccccatttagaattgtagctcaaataaagcttagcaaaaatttatttatttttatatttttaaatatatgataatagcataattatcttaatacatttttaataaacattgcttctcatctcttaccagcaagatggcaccaaaatcaagaaggtagtacatagtaagagtaataataaagactggtcggtgggagacttgctcaggatccagggcacttccggtatatattattagaatggccggtgggagattgatcagatacagtgaatgcatcataagagttacagtgctagctatctgatctcttgaaatcccatgaacgaggacccgagagaccttttccttatcttgaacgtggcagccagagggagtttccatggcggtgagcctgacagcaggataacatttctaaggtgtcggcaagctactattcaccgccgacgtgtcagtgtgtgcacgaaatggataaagaaactggtattttcaacggcggtaaattaaagcattcattaattcatgcccattgcccagaagatagaaggagagaggaataagggtacgatagagatggggccctttttcctggtcccacaacattgtagatatttcttcatcatccatatctgatcatttttgtcagcactgctcctcaattcaacatcatcgttccacggttgtttttttttcaagtgacttttgtttcgaaatatctggaattaatatttttttaatcttattatattaaaataatatgaaaaaaaattaattttaaaaaataattaaaatccatggcacgcgtttagttacaggcagaggggcaatcctattgtaagaaaaaaaatatctttatactattttggatattgtacatgctttcttgttaaaatatgtttggtataatagtttttatttttgtctgacaacatagaaaaaactgtatgattatttaaataatttatgttttttttacctgacttatatataattacattttaaattttaattttataaaaattaaaataatatatttttttatttataaagattttttttatccatgaaaactgatttttatttattttacatgcaaaaattcatctcattataatttaataaaatattttatttttaaatttatattttttaaaccgtaactaaatttttttaattatatttttaaaagctaaatactattgtaatctcaaacacacagttaacccatccactacttttctattatagattctaattctctctctctctctctctcttgaacaagatatcaacattacttaaatcccatcaagtgcctcctgcgacatttcttctttaaattatttggcataataacatggatatatgtttatttaaaatgaatttgcttccttcccttgtatggtgccctaaacagggacccaacaactttcaacatcacctttagcctttcggattagatcaaaggcctttctaaaggaaatgatacgttggagtttattacatttatcatcaacactgtctgtacacgtagatggacatttttgtgatttccagttataccattagttttatattctttttctgtctgcttccatttcctgtgctccacttctgagcctataaatgtggcacttgtttcattcatcacttcatatcagaagccatttcaaagagagaaaaaagaagaaagaaatacaca

SEQ ID NO: 149 - DNA, 534 bp, Poplar sp.
aaaccttatccttggtctcttgtcagcgtaagcattcaacatagatggatgattattattattttgtttttaaagatagatgatggatttttctaaaaaaatatcatggttcggtaaagattttgggataataatacatattaagaaaatatttataaaataacgtagttttatattttagtatatttttttgttcataatttttatttagaataataattgcattttaaaaaaaattctaatatatattatttaaaattaattaacctaatcaaaaatcaattaaaacttctataagatttaaaagttagaaaataagattcaaagtacaaaacttttaattaaagcttgtgtttaattactattcttaataacaatcgtattcaactatattattttattaatacttttttaatattacgaaactctaaaatatctaacacgacatctataaaaaagaaatgaggggaagggggtcacaaagcaaacatagagagagagagagagagagagagagagagagagctaaggaca

SEQ ID NO: 150 - DNA, 3250 bp, Poplar sp.; identical to SEQ ID NO: 138

SEQ ID NO: 151 - DNA, 3018 bp, Poplar sp.
atggtcaaatttgaatgaatataaaggatacatggaccatgttcaaatcaaacaaacatatggtgggtatttaagaagaaaacaaaataacaataacaataacaataactagtcagacttatataatgaacaataacaataatactcattatttcacaccaacacacacacacacacacacacacataatgtataatagaaataatttcactcacccgaaaaatagagaaaaaagataaacgaatgcaaaaccatagattattgaggctcgctaggagaaacatcagcaaaacttataacggatatggaaaacactaaaaaacaactcaaagcaacataacacaaaagattaaaaccgtaaacttagagaccaaattgtaataataaagtcgaactgaattcacttgatcgattccgaacataactcaaactgatcgaacctagcagacctgattaactgtcattacagggttaatcagctataacatgtgaatcggtcgactggttggtcaagatttccagaatcctgacctgctaaccaaaaatctgcagaacctaaaagtaatagacattctattcttcaataaactcatattccagacatcaacccaattcatttaactaacaccctaatacatagattaaatcccttaaatcatccatatatcaaatcaatatatattaaacatcttaaaaccctaaaacacttccttaattcatgaacaatcaaatccccaatcaaaaactaaaaagaaggtagtcataatacttacttacttccccaacccttcttaaaatccaaaagcttaagtttaaagtgagttgaatcccttggtattttgagagagaagtcacggtaagagaaggaaaaaaaaaaacctctggtcacatacctttatatatatatatatatatatatatatatatatatatatataggtttggtttggtttttgggctgacttgggcttaggcttgtgtttggtctaagaatttgggtcttacattacaaatgttaaccttaagatttaaagagataagaatgttggaagatgaatctgttaatgagttttatgtaaaaattaaagatattataaatttcaaattcaatctaagagaaaaaatagagcagttgtaaattgtaaggaagattctaagatccctacctgaaagatttcgaccaaagaaaagccataaaagaaaggaaggatttgaacactatatgtgtagaagaattcgtagattccttataaacttatgaatctacattgcctcataaaaaaaagataagtccattgcatttaaatctattaagaaataatatgattattcctttgatgatgattttaatagtgaagatattgctctcacagctacgaaattcagaaaattaagtttaagaaaaagaacaatggtaatgattaaaaaacaatttccaaaagaaatgagttagaaaatggaagcaaatgtaaaattaaatctaagaaaagagttaagtgttttgaacaattgaacaattttataattgaacaattgcaagtattatcaaacaagtataataattttactattaagtgggaaaaaatattgatgttgttgacaagttgctaatgaatatgcaacaagatattatacaggttaattatatacttgtttaactcgacttggatgtcgaacaagtgcattagtttgttgttggtgaagatgagaactaggattagtgtcaaaccaagaggggacaacgatgcatgcaagggatgcaaatgacaagcaaaaggagaaaacaagtagccaaccagccaactgtcataattgtttttgctttactagaattttgctgatttttaattataagtaatgaatattaaatattctggtctgtaataattatgatattgttttttgtagaataagaacctctatgttgaatatttgatgcactttgaacttgatatatataattgtataacaatatcttatatatgatagttttttaatatattatgaattgttatgatacaatatgttgcatatagtattttttaaatatgttattaactgtttacatgaaatatattaagatcgattaattaggatgatgttgcataaatattattatattaatttttctcatgctacttgtttcaaaattctcaaagtaaatgacttattaatatccttctccttacttttcttccacttactttctcttagtacattcacgctattactaattatttatatatatccgtattaatatacacctaaaataattacttgagagcaaatcttttgcttaaccaacacaacttccaatcatttttccaatgaatacacttttttaaaatgattttttcaattgagaatggatctttcacattattaacttcaaggttggagcatgtgtatttataatgtattttttaattaaaaatatatttaaatgattattttttagattttttttaattttttattgaaaaatattaatttaatattttttaaataaaaattaatttaaaaaatatttcaaactacaaaatcaacacgctttgactatatgatgattaactcttgagcaagcatttcacacattcgggatggagtaacaataaaatattgtaaatcatcctaagattcaaacgttgaacaattcaacaacatgaggaacaaaaaattatgtacaagttggagtgaaacctccaagattgcatggcaaaattatacactatgtgttgttatcttcaaatatcaaaagcaacgcgtaagtgagaatgaagcacttgatgaatcgacacataaaaatattattttcataaaagataatactctgcacgttagaaacaaagcagcaggtactatggtgttaaaaaaataacacaagttggaagaaaatgaaaaaggaaaaatacacgttgccaactattaagtattgtataaagtttcaagctgacgccccagacctctatatatagccctggttcgttcctttccaaagcaccatccctagaactcact

SEQ ID NO: 152 - DNA, 3102 bp, Poplar sp.
ttaaaaaattattaaatcattctaaccatatatgtgtgtgtggttaattattttaaataatttgaaaataggagaaatagctattttattttaattttttaattaacaaaaaatcatatgattaatctcgaatatcaaacatttaagtctgttctttctatcaagtatcagtgaagaatatttaacatataattgaataacatagatgcaataataaaagaaatagtaatgaaaaaaatataagcatctcaaaagctataccaagatatcggagtgtttttgcacgccttttcaaagagaggtaggcagtaggccagactaggcaggtttacaaaaataaaaaataaaaaattgggtcctcctccaacaaatgggcggccgctgagaatttggagtcggaccaatgactcctacctccacctttaataattgctagatttccaggtcttcacaggcacaaagttttagcagtgtattattttaattttgactttgataatagtttctgctttgaccacctaacttctccatggctagccaaccatctttaaattttgcttttattcaacgcatgctgcccagaaatttaaaaatgctccttgtttgacccttttttgcattactcatgttatttaataattgtattgtgtttgttatgtcatgttatgatgagttgaaaaattaaacataattaattgtttgataatgaacttctatgttatattgttaataaaattatttaaattaaagaatttatttaatgaattaaatattttactaaaaatgccagattggaccaagaattgttatatactttataccccgtaaaaatgaaaagacattaaaaaaaaaaaaaaaaacaagaatggccgaggacgtcatcacataagtttaatatattatatacgatggtgcatcaagatacatataaaaaagacccaaatagcctaaccaaggatacatgtagcccagccaaggctctttgttaatgcctgaaccgaggctgcttgtggatggcctaaccgaggctattggcctaatcgaaagagagaaggagaggaaaaaaatgaggcagtctacatatccaatcgaacccatgagtccagccgagaccgagagagggaggaaaaaagctgacccaatcaacccctctgtagccttcaagattaagatataagataaaaaataaattataaaacttgaattagcccaactgaatcagcccaaccttggcttaattcaacttaactcgaattataagattaagatattttaataaaaaataaattataataaattataaaacttgatctctaataaatttaatattaaaagataaattaaaaaaaaaactaaattaaaaaaatatatcaagttatcaaattaataacttgaattataagattacatgattctatccaaaacaaattaaaataaaatataatgcaaaacataactcttgctttatccattaccatgacatcatatgtgacaattctccattatctagtaaatctaataatgaattataaatttttaaaaaactaaattataaaaaataaaaaaaattaataaattcaatatttcaacaaaccttgttttatgaggatatatatatatatttgttaaatcaaacatgtacaaattcataaaacaaaggacataatcaataagagctagcagggaagaaacggagaggagttgtggtggtagcattgagtgagaaaaaaataataatggtctgttatggtatgagcccacatgctctttacagatggccatgagaagcttctattggccaattgaaagtttgaaacatctagaccatttcctttgttttcccctgaatatgtagcattgggtttcataaatacactggaccggaccatcaaagccttgtctggtggactaaattgcatcatttaaacatttaaagggcctgatgcataattttgactgtgacacctaacaggcctacacggtccaaactcgagggacctgaacatctatggggccttcagctagtttagggtttcattttcgataatggaagctccatcccttttctaataattcaagtttaaagtttctcctaaaagctccactgtgcaattgaagattgagtgtaaaagacgctccaagagtcattttcgatcacattgacatgccaatcgaaagtgttcttttttattattattattaatgtgaatgtctggactaatttgcgcgtattttgattaattctacgagccatgaagttaacgaccatgtaaacttccaatgaccctgaactttatgagattcgaattggtaacttctagaaaacaaacttaaaacctgactagatgagttacactcctcgagactgtgttcttctaagcagtggtgaccatgccaaaaaaatcaacccatgcatgcattctggtatcaatttcttagaaaaaattgattttgaaaaaagaaggttacacataatttaggggcatggttcactttcattctttttaatgcacttgatgacatattttcaagctattaaaattttaaaaataaccgctatcttcctttccggcaccgtccgagcccacaacactacaattcgttgcctgccacttcatccaaatgtgatgtgaacttaaatgagtagagcccatatgtatgagcttaactaagatcatctggtcaatagccgagcaccacaagggtggtcaggtgcatcttaaaggggcttgaaagagagagtagaagccgaagctcgactcggcgataacctcaaatgaactagtatcacacatccatgtcctcccgaggatgagataaggtcctggagcttcttccacgtggcaaatccattgtggtgcctaacgataaggctagcattccaagaatttccaccctcatgtggatagaatggtgtcatgtcatcacttatcatatccaacggtcacattttgctcattatcaaccacgatagcttgtgtccataggatatgagatagacaagttgaggcattatatatacggtgtggcaggagtacttcaatcttacaatactagcaaaaccacatatagagggtgtaatagctaagtagcctgtaagag

SEQ ID NO: 153 - DNA, 3009 bp, Poplar sp.
attaagattttcaaccaattattgccattcaactttcaacaccccaccacaaaaaaaaataaaataataataataataataataagactctaattaatataattaatattgtgaggtgaccttaactggtttttctatctttgattcctaaagatcatcagttcgagtctcacaaacctcaggatcattggaggtttacattgttgttaatttcagggtccgtgaagattagtcaaggtgagcgcaagctaacccgtacatccacgttaataataataataaaaaactttaattaccccacgcgcatatatatattcaatttgtggtttcaaataaattacaagaaccaaacattttcgtgattttcttttcttttcaaataaattataagagaaaattaatgctaactattagtgtaatttaatttaattaaagtccatatgggaaaaggggcaacccatagtctagaaaaaggtgaaattagagaggtggcatccatgcaagaaaaggtccaagaaagcatgaagaggcggcagtgcgttcagacatgtaaaaggggaagaatatgagaccactcgccacatatacatccccctcgaaaacgccgtttcaagctcccggttttcaggaagtctttttcgatggttccatcccattttctgagctaaaaacaggtgactggtttctggttttttgtgtatgaacattggcgattaatatcttaatcatgattaagagaacacttataattataatcaagggacagcattaactaatttagttgatctcaattacatcacgtaatcttaggacacccaacgtggattaaattatgtatgtaacttggtagagatttgcactcgaaccctagatggtcggcagaatgtacttttttttttgtgtacaactaagaaggttctctttttctgagtttgattgcttttatttttaaatatattttttttgaaaaaaagttcaattaattttttagtgtttttttacctccaatgtactatgttaaaaataaaacacacacacacacacacatatatatatatatatatatatataaaatatttgtttttggctattaaagccatggtgagtctgtgatacaaattttaatcaaattgcaaattcaagaaccttaaatttagagtcactctcgctcattcaaataaataagagattttaggagggaatcatatcagcatccaacctatccatcaattttaatcggatcccagaactacaaattaattttcccaattgaattcctaaaggattggacatttctcaattgagtattccaacaactatatttattggcattttccgttatttcatgcaataaatagcatgaaactattttgaaaacaatttgacatttttctattaaaaagctacaatgatgtcaaatgaaacaagaatttcctaacacgtgagaattttttttataaatttaatcattagaagttcataacacattggagtcgaaaacaaaattcttacaaaatcttcaccatctaagttgtccatagcaaattacattttttacaagagcgatagcgtttgaaaacgcgggataactcgctttctaaaaagttttaatttttgttttttgctaaaaattaaatttttttttatgttttgaattgttttgatacgctgatcttaaaaataatttttttaaaataaaaaaaattattttgatgtatttcaacatgaaaaatactttaaaaagtaatcacaatattctctcaaacaggttcaaaataaaaaaaaaaaaaaagaagaagaagagggagttgctgggctgtttagtaatgtgtaacggaggtgagattataatgggcggaaatggttttagcccgacttctctatagaaatagccatgggcccatggcattcttctttgggctaatttaaattgctagaccattttctttttttttccctaagaaagtactggaccagaccattaagaaccctgtccactccttgtttacttggccattttcaatgcatactgagctggatttgatcgttagaggacctaaagcattgcttacttgtgaccacgtattgctttaaattttgaggttttgagggtgttgttttttaaattattattttttatttagagttgtattaaaataatattttatttatttattaagatttattcttgacatcaaaataataataaaaaatataaaaaaataattttaaataaaaaaaattaaattttaaataaaaaaaattaaattttaaatgatctttatttggatcgcaattccaaaccaatactaaaaaccagattgttgagctttcatgaatgttttggttttactttccataatgaaattgctccaattaaaaaaaaagaaggtaaaatctagtgactccagccaaacctaattggttaactctaaatttttttattttaaatatgaaacaatattattttttaaaaatcttatcgacccaaattgacattaactttttttttatatatatatatatatgaagtaaactaagctctaaaatcactgtgtcaatggcaagctgccaagaaccacagaagtggtaataaatatcttaaattaagggagctgaaagagagagtggaattaatcgaaaggctgcctcagcaagaaccataaagccataaattaactagcatcacacatccatgacgtcctccatgggatgagataaggtcatcgagcttcttccacgtggaaacctctttgtggtgctaacgatgaggctagcatcaaaagaattcccaccttcatgtggacagaatagtgtaatgtcatcacttatcgtatcgaacggtcaaattccgctcattatcaactccactgatttgtgaccgtaggatacgagggggacaagttgaagcactatatataggaagtgacagtaaagcgagttcagaatatcacatttatagggagcactgcatagcttacaagcttgtaagagatggcttcctcctct

SEQ ID NO: 154 - DNA, 3201 bp, Poplar sp.
tttaattgcattttcaagaagacaaaatataattgatctcaaattaaaacagacaataaaaaataaattttaaatatgtaactctatctttttatcaatatcaactaccattattaattcctctcaattttatcaaagataacaacataaataaaaattgtcttccttaacccatattaaaaacataaaataataaagaaataaaactcatcacaaatattaaattaacaacaaaaggtctaaaaaatcaagagatataaaaaagaaaatagaaaaagattttaaacaaacataccttttaatttcagctaattaacacaaccgatgttaataattaaccggagaataattgattcttgtttttttaaatttgagagaagggtgagacacaatacaaaaatttaaaactacaagttttttcttcatgtatttatagaaaatttcttctatattttttgttttaataaaaaagttgttggccaacggctataaaaatagtcattggccaacaactatcattttggccatttctatagttaaatgtagaaatgactgtgaagaaaacaaatagccattttggctatttgtttagctcctccgttggaatgcaaacagtgaagaaataaaaagcgaatgacgtttggcttctcatttagctgctcggttggagctgctcttagcttgatcgaattattcagaattcaataaatttttaaacacatatttttttaaaaaaaaaacagttataaactgatatatcaacacattctcatagaattactccatgataaaatttccaccgtcgccattattgacaacctcgcccaggggctaaagatagcagacatgctgtttttttgagatgatttgaaagaaggtgagagaatgcaaatggttgttgttattaatgggttcttggtctgtgtatattggggtccttggagtttctgtggagttagtttccaatgtttttgggttttcaagctttaatcacattttggatactaatctcatcctctttcgatgagaggattcaaactgtaatgagatgttttaagcacaagacgataaatttagaaattcaaaagaattatgaaagatcatacactcatcacgacttggtagtacacatgtcaccttctggatactaatttacatcaccacacaccactcaaatcacacacacacaaatatatcattctagtaaaaccaagaatctctcactttccgggggcgaagtttgtggcatatgcccaggcgttgttgttaactgggtcagaaaggtggtcagcaaggttctccagtggtccctttccggtcacaatggcctggacaaagaatccgaacattgagaacatagccaacctcccattcttgagttccttcaccttcaactcagcgaatgcctctggatcatcagccaagcccagtgggtcgaagcttccacctgggtagattgggtcagttacctcaccgagtggcccgccagcaattctgtaaccctcaacggcacccatcaagaccacctgtgtagcccagatggccaagatgctttgtgcgtggatcaagcttgggttgcccaagtagtcaagtccaccctcgctgaagatctgggctccagccttgaaccatacagcctcgccgaacttgacaccgttgcgggacaagagctcggggaagacgcatccaagagctccaagcatggcccacctggaatggatgacttcaagctcacggttcttggcaaaggtctctgggtcagcagagaggccagcagtgtcccagccgtagtcaccagggaactcaccagtcaagtaggatgggggctcaccagagaacgggcccaagtatttaacacggtctggtccgtaccatgggctcccggagggaacaggcttggtggttttcctcatggagacacggccattgcccatgatctcagaggaggaggggttgagcttcaccgcctttccggctagcgaaggggaggagagggccattgttgctgctgccattttcgagctgatgagtaaacgtgtatgtatttgtgatttacgattgaagagatgatgtttggtggccgtgggttggagttgacggtcttctttttatttgatcttgtggagatggtccttatcttaggatttctatgactgcactcttattggttggtcacgttttcgaagatcgattttgaatgtcgacctggcactctctacacgacctatcatctccacgtcattttggctgccgaaaaacgtatccgaaatctggagcaatgtttcaagatgtgtttgttccaatagaaatttgccacatatgcttttggtcatctcacaatctatctctattagcttggaggcagccatgaaatctaacgtcatgttgtctaatgtgctctacattatgtttatagcagttttacctcaaattagtgagaacagttagatttattgtttccttctggtggacaagagttaaaaagcacaagacatggttggtgtaaatcttgcatcaatttatcatattgattacaatctgacagcaatgccaattaccagttttagcaatctccaccagaaaaaatataggcctccaagaaattctggaagaagcatggctttaatgcttcttgacatgagaaaaggattgtgttttgaatggaaaactggctgccattatagctagaaaacactgattgaatccaccccagatggggagtatcattaatttggttcaagaaatacaattaatgaagacgttttcttaagaagaagaaaaacttgaagtcatttgatcgagatattcctggctagacaagccacaacctctcattattttcatttcatcagatattttgtgaagccattctaccagccactcaattctgataaaatgtatacgtggaatacttacaacttcagaaatgaatctaataacatggtgatttagagggtgccaagtaagataataagtatagagcccaaaatctagggcctccaatgagatgagagattcagatacccgaagataagagcttctgctctataggtgtagccccgtgtaatccaagaatttagataccacagagataaaggaactcaaacgcatagcttcctacaaataccccagctagccaatactctccaccactaaacccaaagctcaaaaaaaatcttaactgcacccgctcatccagca

SEQ ID NO: 155 - DNA, 3226 bp, Poplar sp.
ttgttgaggtgctgccattagcttatactaaactgtatcacagggttcattgttaatgctacgctcagattccgattcaaggagggtctactgggatccttatactaatcccttgattgcatagcaagaaccacaatcccttatttactgaaatgggtgattctggccagaaccaaaatagcctgttgaattttgagcccttttttccaatttcatttgtagagtgctggtcttcaaatgacatctaatcttaatttgtatcatggattttatagaaaatacaagggatgcttctattctgaaagaatctttgcctgaaggtgcagcttgggatgatagaagccattaaatttaccactgtcatcaacaacttttgattttgttatatcataaagaaaactagttgattatatgcaaactcctgggctgctcaaactactctacgatgaacttgcatgtgtttttatttatttatttaacttttgtatgagctccagcagacctgacctttcattacatgcaggaagaaattctgaaagtacttcctgccaatgaagcaaatcaatacgatggacagaggctcttccgtcctgaagaactcatagagctgtgctttaaagttcaaaacccagagcttgcattgcggggctttgatgtgtttgcatggactagctcctcatttcgtagaagtcacagaaaccttctggaggagtgctggaagaatgctgctgatcaggatgactggggtcaactccatcaagcatctaaagatgaagggtggagtgatgaggaaatcttgcagcaactgagagatacagtgctcttccaggcatcaagcagttgttatggacccaacgcagaaatcatcgatgaaggttttgatgctgtcttgccattgagaaaagaaaactctggagtttcagcattggaagatttggatttctctgtagaagcaatactgatgcagcacaaggattaccctgatgcaggaaagctaatgctgacagcaatcatgttaggaagtgtacatgacaattcaaaagtagaagagaatccttcttcaatggagtaactgacattgttgcagttcattcctatggatttttgtagattgagtaatagaatctgcaaaacattattaatattctagtctgaagttctgccatgctttgttcaatccaattcagcgctgcatatttattatgaagtttgagattgtggttgcgcttgttttttaaaatattttttattcaaaaatatataaaaatatatattttttatttttttaaaattatttctaacatcatattattaaaatatttgtattaaacaagaaaaatattttgaaacctgtttacatgcaaaagaaagagatcaaaattggtgatgacatatccataggcatggattcaagcggttatatatgagttttcagttctgctattgttaccgtcctgggtttttgttagcaaacttagcataaacaaataataataataataattattgtatgaacaaggacataaaataaaatcagttggatcagattctaaccattagttaccattttttaatttgcctatgaaaccttgcctccaagcatatattgttggcttgcctatgctgagagtcatatgactcatatctatttaaaaaaaaaacaaaaaaacttaaaaagagatattagtcataactaatatttttctagtaaaaaaaaattaaatcgtgtgagagttaatctgagataacttggtcaactcaatgagttcaaacgactggtaaaaacataatttgactaaaacatattaagacgacaacatataaagttaactttttatgttaaaaaacatatatcgacttgagttaacatgagttaactttttaaatttatgacccgggtcttgagattatgataaccttatataaagtaaatcaaaataaattatgaatttcaatttccaatgttgaagaatgaatcttaaaaaaaaaaactaaaaaaaaaggatgaaaaaacaacccaagttaaaccgagttaatctgtctaatccatgatccgggtcatgagatcagggtaactccataaaaagtaaattcaaatacattatgaagcctaattcccaaacaacccaatgatgaaattgaaagaaaattcaattttaaaaaagaacacaataaactcgagtaaacccaccaaactcatgacccgtgtcataataacaggataacatcatagaaagtaaactaaaaaaataacccgagttaacacgggttaactttataagcttgtgatttgggtcatgagaaagataatcatatagaaagcaaatcgaacacatcatgaagcctaattctcaataaactcattgttgaatgatgaaattagaaaaaaaatcaatataaaaaaagatacaataaaatgacctgagtttacttgagttaatttgcaagattcatgagacaaggataacctcatagaaaacaaatcgaagcaaatgacaaatcctaatttttaatcaatccaatattgagaatattgaaagataaaactaaaaaaataaataccaaataaaaaaaattcaagtcaattagaagaacatgttaaactcataacaagatattaatataaaaaataaatcataataaatcacaaaacttattttttaataaatcaaatgtaaaaaaagaaaaaaaaaagaaaaacatagattaaaaaattactgttgcaattgcaatgaataataatttgtaatatattgcgaagtaaaaacacctcctctttaatttttttttaatattaatgttaattggctgatttgacatctttattagccatttccatgtagaattcttttttttttttctgtctattttgttctcatcgatcgaggagcattaaccacccaaataaatcttttgttttaaatttaatctctatataatgtggcttgaatcgatgataagcaccccaccaacaaagatctttcaactccacatggcataagagtagcctatattttcttggaaaaaatcgacatggaaatccacatcctatccagtaaccaatgggataccgctgacgtgtagatttcctaatccacaacatcttgtcatttcatatacatctcccctcttcctgcgttgattagcatctacactcagtcagccttgatagagtaagagaaaagcagagcaagcaacttagaggcagcattaacaaagaagagtc

SEQ ID NO: 156 - DNA, 5170 bp, Poplar sp.
atatatatttttaaaaaaatactttaaaaaaaaaacggatattgattgagtttaaacaaatggatggtagtcttccagagacaagtacacaattccatatatatattagcagcacttttcgtgtacgatagtgatatctcatgccaggcctcgataagagctctgttcattttgatccatacacattcaaggggaatctcctttataacccaaattggatggtgttagcaagtgaatttgagcaatgggcatataacttttcgataagataaaccctagctagtttgcatttttgacttgaattacaacaagaagaagaagatggcgtgcgtacgtggtgattccaatatcccatgctagctaagatcgtagttgttacaattcagtgcaactctgatcagttcatgttcaagatccaaataatcacttcaaagactaattctaagtgattactttgaatattaattatggatttgtaatgctataaaatgtctgaagatagatagatagatactcgtaactttaatgtacgtacgtacgtagacgttcatgaagattctctctctgtatatatttccagcaaccctataatattgctgtaaaattcttgctggttcatctttacattttagaactcgtcttccataatttgcatgtattgtgattaaatccacttttttcgattttttatgtataaaaaagaagaaatcaaagggaataatattacagatagaagccatcgagagagaatggctggagaaaataaaaaactgcatcgatcgcacactctgctgcaactcaatgcaataaacaggaagacagctgcagatgcttgatgccagaaacaaaagtagagaaaaggttaaattcaacgaggagggaggaaacaaattaatcacctggctccttgaaatcgcctatcaaatcttaaaataaaacatgtattgagaaattcatgctaacaatttttaagaaaatagaaagtttcttggtaaattcaatgctgacaggagtcaggagcccttaattaggtttcgaacctggacagccccgctcctgcaaaaggactgggtttctaccgatcagtttttcttaatttaataatttaaattattagataaaatttaaaatataatttatattattttttaatatatgttttcaagtgaaagctctttgatcttgaaatttacacagatttatattattttgtgcttaatttttatcaaataaataaaaatgataagattcgaataactcgtgatcgtttgattattaaaattttgataaaatttcaagattaatatattatttttttaacatgatatgatatatatgtaattctttaacatgtaactttgaattaaagcttgaagtgagaattgcatatgcattgaatttggcttcaaatgtcttaatttttattctttctgcacttgtttaacatgtaactgagaattagagcttgaagtgagaattgcatattatgcattgaatttggcttcaaatgtctttttattctttctgcactttcttattttaatttattctttctgcactttcttatttttaacgcgcgtgatagcatgcaaatttccaaatttatgcatctcgtctcttacttcaaattgatgctctttcccagcttggagagctgcctggttcaattctacccaccaactttgaccaataaaaggcaaaagctgcaaaaaaaaacatcacatgataatacctgttttgccctttacagaagagaaaaaaaagctagttgggatataggtagtaattgtttttcaaagtgttttttattttaaaatatattaaaataatatttttttatttttaaaaaattatttttgatatcagcatattaaaaaaaatatacaaataacaaaaaatattaatttaaaaaaaaatttaatttttttttaaaaatacttttaaaatacaatactaaacacgctaacgataatctccttattacaagcttagctatgcacattatcgacaagttgaacatcatgccaaatatccaatctatcatcaccaactgctggttcagaaatccagattccggcgtcaaaattcttgacatgggtcaacgatatgctccagttgcttacctgtttaatgtcaattttctattaagacggtgggatccaaatatttaattacttgccagcaaatgtaatctgtactggtaacgatggattgtttttgtatgagtttttttaattgaaaatgattttttatatttttttatattaatatattaaaatcattgaaagtaatttaaaaatcatcatttaaatttttttaatataaaaaacactctgaaaaataaattaaacaacaataaaagatttattaaatatttatttttgcattataacttgctttttaaattaatttttaaattgttttttattcgaaaagatattaaatggattttttagatgtttttatatgattttaatatattgatataaaaaaaatataataaaaattatttcaatatatttttaattaaaaaatattttaaaaaaatattctacgctaaaatattaactaaataatatttaagcattctacagaacattaactaacaaactaagcaaaggttaaacaattaatattaattaatgtgaaatcaacttgttcaaatattttattagaataaagaggaaaaaatggtagagggaggtcataattatagcaaatttacagcccttagacacatactggagcctccaacacaccaccctgtcgattttacctggaaattactcgaggctccctgcttggcctctcgtttcgtttatcatgcatgaaagaaaaataacccaattattttaattccataaaatactaaaaagacaaaagaaaaaacacgacaaccaacttcctcgtgtcaagatcttgaaccatctagtaaaccaaacttgttcgacctttaacacctgacatggtataaaaacccacttcccttccctctcttaccctcactgcatatcgcaataattattagcgcatctccattgctacaggaagttggtgctcctccccctatgaagcaagcattcctcctggaatgcacttctattgagtccgcaagaaaaagcaaggaaaaccctgcttgttaatcatagtctccaagctcttcaacgcacttttagaagtcttctcaagacattttttggtgagttctttttctgtgtattgagaaacaacgagaaactcggttgtttctatgatcattctagctagtttaattagtttgtcttgcgcagaatatcgaggagacatggtagcttcacggctaagatcttttaatgtttgaagcttcttttttttttttagctccttttgctctcaaatctttaccatcaactttcctttttggaattttgttttgggtctttggaagtgggattttatgtttctgaatctacagacaaaattgctttagagctaaaaatgaacaaacagaaagtgtgaaaacattggagccccccctctctacttctcttatttattttttaattttttcaagtccttaaatctattttatgttttcactgaactccttgaattctatctaatttccgaacaagatgcccacaaaaatctgagtgtgatattgttcttttttcacaggcacacgaaacttgaaacgctgactaacccaaaactccaaaaacttagatttatttcagtgtcatatacattcatccatttttctaatactgattttaacatttatttttctgggaaatacttaacagtcccttatatttgattctttgtatttttgaaccagttcttggaaattaaggctgcaagaacaattggtgtctagtttgtttgtttttttttttaaaaaaaaagtgagagaaaggaagaaagacataaatgctgaggattttaagagaccaacaacaactgaagtggataccttgtaatagttcgttgaagtggagggagtggagaagttacaacaattgtcgtagaaaccatcaaactagcatccgcatgaattaccctttttcctcgtattagcttccgatccaaaaatcacacaaaccctttaggtccatatctagtagtcaaccattttatacccttggtttggtttcttattatgtttgttttgtgttttttttttttttgggtgtgcagtaactaagtgtaagacagcaacaatgacggtgacaccaaagatttcaatcaatgatgggaaccttgtggttcatgggaagacaattttaactggagttcctgataacattgttctgactcctggctctggtgttggacttgttgctggtgcttttattggtgctactgcttctcataacaaaagtctccatgtttttcctgttgggggtttagagtaagcattttgaagcctttcctttcattgctgatgatcttaggttatgcgttttttttctttcttttgcattcttggagatgctcactttcaatttttgtggcagggatcttcgatttatgtgttgcttccgattcaagttatggtggatgacccagagaatggggaagtgtgggaaagatattccactggagactcaattcatgctagtggaaagcaagggtggtggtgaagaagttgatcaagatgatgcacagacaatctacactgttttccttcccctgcttgaaggccagttccgtgctgtactgcaaggcaacgacaggaatgagatggagatttgccttgagagcggtgagtagattatggcaattaaagtgtccggtgcaacgctaatatgtacccacccatgagcctaatctctcattattgagaccacatcacagacttatgggctgtacctgtcattagttaccctacttcatatggtcgaaactactgttaattcagtctcatcctgtcggtcactagtgaaggagactaaattctgaaattctgggttggggctgtcattgatgtgaacactaccaggctggagaaccaatcaatgactccaccatccagatgaatcgtttttttggagttcctttcatttggaagaaatagatagagaggatcgagtttgaaagaaaccgaaacgatgcgtttttttgtggttgatttggttttgcaggcgatagtgctgttgaaaccaaccaaggccttcacctggtctac

SEQ ID NO: 157 - DNA, 3000 bp, Poplar sp.
gtgaatcaaggttgtttaaatcataatttaacccataaaaattatataattttacgagttaatatatgtttaacatgcagaatcgtattaaaaactcgaaaattaataaaatcgggttgaaatcgagtgaaatcggtaaaattaaatgaaatcacaatatatatttttaagatacttgaactatatatgattttttatttgaatgatgtattttaagatgtttgaaaaaaaattttcttataattttatgattttacaatctatttttgtgattcaagtttattttatattttttatgttattttaaaaatatatttttaaaaaccttgatgtggacagtacaccagtagtagctgacaagattttagtctattttaaaaatcccgtattttataaaagaaaaacacacaatcattaacgagtatgagtgaacaatcagcagcccaagcatcctcctctgcttgccaaaaattgttccttttttaaaagacacgtctttgttccaaaaacaatatcgtagtatattaataattcgccaaaataattaacgttatattctctcggtgggccccggattggttgtgaaacacgatgattaatgggcctcttctcttgacaggataacaatgatttaggatatcatgtgagtaacagttattttttattttaaaacatattaaaataattaaaatataatttaaagtaaaaaaattctttaatttttttttgaaatacaaaaataattttgctgtgaaagtgagacggtgacaatataaggattttagaagtttaattacggtgtagaataatcatttcaacttaataatttaaattgttaagtaagatattaagatataatttatattattttatagtatatcctcccaaagaaaatatttttaaatttagaaatttacacagattaatattattttatatttaatttttatcaaataaataaaaatgatgagattcgaagtagtaatggtttgatcatttaaattctcatataaaaaacacctcattttaataactaaaattattaaataaaattttaaaatataatctatactgttcaaggctacacgatgtcattaattttatagacgctggtccaaatcagtaatgcatacactttgtacgcaagcaaagcaaccaaactagagagaggaaaggaggagagggcagtagcgtggaaagggagggaagcatagcttaaagtgtcggcaaacgttctggttgaaacttctcgaagagaaaaggagagagagggtaactggtggttagatagaggaggaggatgcccccatcaaaaactatacactctctcttgcagattgctcctccaagaatgaaaacatgctcaaaatcaccatcagttttgtatatgtgtagttaattatgcatcttcctgtagtttatcaacaatttacacagcttgaggggacaaaattaacttgttgatgtgcataatcgataattccttctaatccatgtaaatcaaacgggttacagtgatccatgtacaatatatttttttttagtttaacgtgggtgtccgggtcagcttgcgcgcacctcgattaatttcatggaccctgaagttaacgaccatgtaaacctctagtggtcatcatatgagcaattacagggctcgaacctgagactacagaggaaacaaatctcttggtcccaagcttttaccactggcccaccactagatggttgatccatgtataatattgtatgtacacgttcttgtttatctattttcgaatatagctgagatttaatttttagaaattactacttcaagtattataaatctcggatcattaaaagtttataattattatataattattaaatttaaaattttaaaaaattaattaaaatacatgtaaattaatctaatactacaattaaaaataaaaaaaaatgatttgtccgctttggaaagtgaaagggatgaggttccttaccatcgttagttggatggcatcttttcattcaccaacactaaaaaattacgatcaaaaccaaccccactttacaagcaattatgatgtctcctctcttccccaaaactggaggtgctaaagaccatggaaaattaattgtagtaaattatttttaaaatgtttttggttttgaaattatattaaaataatattttttatttttaatattagttatattaaaatattaatttaaaaaattaaaattcaaaatttttaaaaatccaacttcaaaagtaggtgaagccctagtcttaattaatatgtcagtttgtttttatatttaaaaaatatttttaacagaatttaaattttatttattaaaatgaacaaaaaattattttaatatattaaaaaaatattttaaaaaataatgggattaataaacaccatgtgaacgggttgaagttcttggaaagcaaattccattaccaaattctacttttcttcttcttcctttttttttttgggcccactgtctagagtgagaaagaaagaaatacaccgcagatttagctgttagaaacacagcggtggacagacaggctgtccttgtctagtagcggaccggtcaccctcacaaccacattcaataaattcaataaatataattccgtacttaaaaatgttagcaaaaacgtggaataaaaataaaaataaaaaccccaacccaacccaagtttctcacatgatatgatactgcttgttgcttgactctccaccgtcatcagtctcctctgtccaccattcataatagcctcccgcatccccacgctccatcactcctccccacacttgagaaagagagagagtaacacagctcgcattttctttttgtcaatacagtgtcggtggagcttcgagttctctgcctttttgtttttgttttcgttttcgttttcgttttcttgaattgagggaggatcaaaagtaaggtaatttactaaattaatacaagaagaaagggtgaaatcttaagaat

SEQ ID NO: 158 - DNA, 1815 bp, Poplar sp.
agattcttcatagagggagcaagaaaataattattttgtaaatgtatagctagaaattaagtggtatcattcgtgaagctttatctaatactttaataagatttagatttagaatttttatttagaattgggacagttcattgatattggatagattttttatgataaagaataatgaattctactagtatcatcttcttgattttttaattaaaattaaatcatcagaggataataagggattatgcaaggtttaatttagtgtaaaaaagttttttatttgaaggaaagtgataagtattaatataaaattagtcaccaaaaaaacataaactatgagctgagatatttagttttgacggaagaaaacttcatgcctaaactgtaattatttgaacaagtattgagataagttgtgggcgtccgtcgtgatttatatatcaattaggatgagttgaagagtagataatgagaggaaaaacaaactagtaattaatcacatgactgctacaacaaccaagcccactaattaaagggcttcttcgtggtaggtacgtatttcgcatgcaggaggcaagactcgttcaattaataattataaaaaaaataattaggagtgtaactcaactggtcaggttttaagtttgtattttagatattattaatttgattctcttaaacttcaggaccactagagacttatatgatcattaactttagggctcatgaaattagtcgagatatactcaaactaactttaagacttatgttaatagaaaaataaaaataaaagaagtaactatacaaccaccaacatgatgttgtatataccgaacattgctttgcttaagtagcctgtttagaataatatgtaattaattatatatgttggtggaaacgatcaattacacctcctttttatttatgagattcccttaattttacctggcttgaatccggcagtactaattaaatactagccatgttgttgatgaacatgcatcatcagtatacttccctccccaacctctatatattgctttgttttttcttaaatagcaatatttcgttagctgggaattagtcgcacgtttattttaggttgctgactgattctaggtaataatatcatcacacggcatggacaatagttatgtctgacttgaattaaatatccaagagatagataattacctcattatttgttggggtgtaagagaatttcactcgtgagaattaccgatgatcatgacgacatgggagcacaagtcaaggatacatgccattcggtgaagaaaaatgcatgattattaggtggatccatatggtatactatttgctttacagccccacgagactaatatactttatggacaccgatattattcattttacatggcaagacgaagtttcccgattctcaccaaccacaacctcaccaccatgcaccactcccacgagtcatatttacccttctaagccaatcgccaatattgatccacgaagactccacgctccatggtttgtacccttagattgttccaaatcaatggccacaattcagtctcaacaaacccactttgtcacctcttgccggccctcatgcttacctaccatctcctgtgcatgatattcaagactcccaagtcccaaccctctatttaaaccccctacacctcccctctatttctctcaggaaatcccgtactccagaactcaagatttcctctacagctactcctcttcctccattcttcaagactccttctctctcatttaagcttttctttggtctaacatatatataaataagaa

SEQ ID NO: 159 - DNA, 33 bp, Artificial sequence
  Synthesized oligonucleotide
  misc_feature (1)..(33): GUS-NOS ES190 primer
cgcggatccatggtagatctgagggtaaatttc

SEQ ID NO: 160 - DNA, 33 bp, Artificial sequence; identical to SEQ ID NO: 159
  Sythesized oligonucleotide
  misc_feature (1)..(33): GUS-NOS ES191 primer

SEQ ID NO: 161 - DNA, 39 bp, Artificial sequence
  Synthetic oligonucleotide; based on poplar sequence
  misc_featured (1)..(39): PtUbi2 ES778 primer
gaggtcgactaccttcccaccacaagtacttcaccagca

SEQ ID NO: 162 - DNA, 34 bp, Artificial sequence
  Synthesized oligonucleotide; based on poplar sequence
  misc_feature (1)..(34): PtUbi2 ES779 primer
gagggatcccgttctgtttcttcttgttgtttct

SEQ ID NO: 163 - DNA, 37 bp, Artificial sequence
  Synthesized oligonucleotided; based on poplar sequence
  misc_feature (1)..(37): PtL5L2 ES788 primer
gagactagtctcatcgctttggagaatcttccagcag

SEQ ID NO: 164 - DNA, 42 bp, Artificial sequence
  Synthesized oligonucleotide; based on poplar sequence
  misc_feature (1)..(42): PtL5L2 ES789 primer
gaggttaactatgaaagagagaaattagggattagccttcta

SEQ ID NO: 165 - DNA, 42 bp, Artificial sequence
  Synthesized oligonucleotide; based on poplar sequence
  misc_feature (1)..(42): PtElf1a ES843 primer
gcggtcgacggtggtataggtaattaatagataaacaagatg

SEQ ID NO: 166 - DNA, 40 bp, Artificial sequence
  Synthesized oligonucleotide based on poplar sequence
  misc_feature (1)..(40): PtElf1a ES844 primer
gcgatcgatgatgaactttgggagagaaactggaattgat

SEQ ID NO: 167 - DNA, 33 bp, Artificial sequence
  Synthesized oligonucleotide; based on poplar sequence
  misc_feature (1)..(33): PtERD4 ES934 primer
gagaggcgcgcccgaaatctatccaacaaggac

SEQ ID NO: 168 - DNA, 34 bp, Artificial sequence
  Synthesized oligonucleotide; based on poplar sequence
  misc_feature (1)..(34): PtERD4 ES935 primer
gagattaattaacatcatcatcatcaggtaacgt

SEQ ID NO: 169 - DNA, 32 bp, Artificial sequence
  Synthesized oligonucleotide; based on poplar sequence
  misc_feature (1)..(32): PtSAM2 ES947 primer
ccataagcttattctgacatccaacggctatg

SEQ ID NO: 170 - DNA, 31 bp, Artificial sequence
  Synthetic oligonucleotide; based on poplar sequence
  misc_feature (1)..(31): PtSAM2 ES948 primer
ccatgttaactttctcaagctgcagatcaca

SEQ ID NO: 171 - DNA, 36 bp, Artificial sequence
  Synthesized oligonucleotide; based on poplar sequence
  misc_feature (1)..(36): PtCal2 ES950 primer
gagaggcgcgcctattcaggtcaattcatctgactg

SEQ ID NO: 172 - DNA, 43 bp, Artificial sequence
  Synthesized oligonucleotide; based on poplar sequence
  misc_feature (1)..(43): PtCal2 ES952 primer
gagaccgcggttctcttttgaaaaatgaaacctagaaggagat

SEQ ID NO: 173 - DNA, 34 bp, Artificial sequence
  Synthesized oligonucleotide; based on poplar sequence
  misc_feature (1)..(34): PtPAL2 ES1055 primer
ttggcgcgccagattcttcatagagggagcaaga

SEQ ID NO: 174 - DNA, 47 bp, Artificial sequence
  Synthesized oligonucleotide; based on poplar sequence
  misc_feature (1)..(47): PtPAL2 ES1056 primer
ctagtctagattcttatttatatatatgttagaccaaagaaaagctt

SEQ ID NO: 175 - DNA, 36 bp, Artificial sequence
  Synthesized oligonucleotide; based on poplar sequence
  misc_feature (1)..(36): PtDREP4 ES1039 primer
gctctagatctataattaatggaatgtaatccctta

SEQ ID NO: 176 - DNA, 38 bp, Artificial sequence
  Synthesized oligonucleotide; based on poplar sequence
  misc_feature (1)..(38): PtDREP4 ES1040 primer
cgcggatccatctctcttgtctcaagtactcaacaaat

SEQ ID NO: 177 - protein, 359 aa, Acidothermus cellulolyticus
  misc_feature (1)..(359): E1
AGGGYWHTSGREILDANNVPVRIAGINWFGFETCNYVVHGLWSRDYRSMLDQIKSLGYNTIRLPYSDDILKPGTMPNSINFYQMNQDLQGLTSLQVMDKIVAYAGQIGLRIILDRHRPDCSGQSALWYTSSVSEATWISDLQALAQRYKGNPTVVGFDLHNEPHDPACWGCGDPSIDWRLAAERAGNAVLSVNPNLLIFVEGVQSYNGDSYWWGGNLQGAGQYPVVLNVPNRLVYSAHDYATSVYPQTWFSDPTFPNNMPGIWNKNWGYLFNQNIAPVWLGEFGTTLQSTTDQTWLKTLVQYLRPTAQYGADSFQWTFWSWNPDSGDTGGILKDDWQTVDTVKDGYLAPIKSSIFDPVG

SEQ ID NO: 178 - protein, 1124 aa, Acidothermus cellulolyticus
  misc_feature (1)..(1124): gux1
MGAPGLRRRLRAGIVSAAALGSLVSGLVAVAPVAHAAVTLKAQYKNNDSAPSDNQIKPGLQLVNTGSSSVDLSTVTVRYWFTRDGGSSTLVYNCDWAAMGCGNIRASFGSVNPATPTADTYLQLSFTGGTLAAGGSTGEIQNRVNKSDWSNFDETNDYSYGTNTTFQDWTKVTVYVNGVLVWGTEPSGATASPSASATPSPSSSPTTSPSSSPSPSSSPTPTPSSSSPPPSSNDPYIQRFLTMYNKIHDPANGYFSPQGIPYHSVETLIVEAPDYGHETTSEAYSFWLWLEATYGAVTGNWTPFNNAWTTMETYMIPQHADQPNNASYNPNSPASYAPEEPLPSMYPVAIDSSVPVGHDPLAAELQSTYGTPDIYGMHWLADVDNIYGYGDSPGGGCELGPSAKGVSYINTFQRGSQESVWETVTQPTCDNGKYGGAHGYVDLFIQGSTPPQWKYTDAPDADARAVQAAYWAYTWASAQGKASAIAPTIAKAAKLGDYLRYSLFDKYFKQVGNCYPASSCPGATGRQSETYLIGWYYAWGGSSQGWAWRIGDGAAHFGYQNPLAAWAMSNVTPLIPLSPTAKSDWAASLQRQLEFYQWLQSAEGAIAGGATNSWNGNYGTPPAGDSTFYGMAYDWEPVYHDPPSNNWFGFQAWSMERVAEYYYVTGDPKAKALLDKWVAWVKPNVTTGASWSIPSNLSWSGQPDTWNPSNPGTNANLHVTITSSGQDVGVAAALAKTLEYYAAKSGDTASRDLAKGLLDSIWNNDQDSLGVSTPETRTDYSRFTQVYDPTTGDGLYIPSGWTGTMPNGDQIKPGATFLSIRSWYTKDPQWSKVQAYLNGGPAPTFNYHRFWAESDFAMANADFGMLFPSGSPSPTPSPTPTSSPSPTPSSSPTPSPSPSPTGDTTPPSVPTGLQVTGTTTSSVSLSWTASTDNVGVAHYNVYRNGTLVGQPTATSFTDTGLAAGTSYTYTVAAVDAAGNTSAQSSPVTATTASPSPSPSPSPTPTSSPSPTPSPTPSPTSTSGASCTATYVVNSDWGSGFTTTVTVTNTGTRATSGWTVTWSFAGNQTVTNYWNTALTQSGKSVTAKNLSYNNVIQPGQSTTFGFNGSYSGTNTAPTLSCTASZ

SEQ ID NO: 179 - protein, 683 aa, Acidothermus cellulolyticus
  misc_feature (1)..(683): XylE
MGHHAMRRMVTSASVVGVATLAAATVLITGGIAHAASTLKQGAEANGRYFGVSASVNTLNNSAAANLVATQFDMLTPENEMKWDTVESSRGSFNFGPGDQIVAFATAHNMRVRGHNLVWHSQLPGWVSSLPLSQVQSAMESHITAEVTHYKGKIYAWDVVNEPFDDSGNLRTDVFYQAMGAGYIADALRTAHAADPNAKLYLNDYNIEGINAKSDAMYNLIKQLKSQGVPIDGVGFESHFIVGQVPSTLQQNMQRFADLGVDVAITELDDRMPTPPSQQNLNQQATDDANVVKACLAVARCVGITQWDVSDADSWVPGTFSGQGAATMFDSNLQPKPAFTAVLNALSASASVSPSPSPSPSPSPSPSPSPSPSPSPSPSPSPSPSSSPVSGGVKVQYKNNDSAPGDNQIKPGLQVVNTGSSSVDLSTVTVRYWFTRDGGSSTLVYNCDWAVMGCGNIRASFGSVNPATPTADTYLQLSFTGGTLPAGGSTGEIQSRVNKSDWSNFTETNDYSYGTNTTFQDWSKVTVYVNGRLVWGTEPSGTSPSPTPSPSPTPSPSPSPSPSPSPSPSPSPSPSPSSSPSSGCVASMRVDSSWPGGFTATVTVSNTGGVSTSGWQVGWSWPSGDSLVNAWNAVVSVTGTSVRAVNASYNGVIPAGGSTTFGFQANGTPGTPTFTCTTSADLZ

SEQ ID NO: 180 - protein, 1256 aa, Acidothermus cellulolyticus
  misc_feature (1)..(1256): aviIII
MAATTQPYTWSNVAIGGGGFVDGIVFNEGAPGILYVRTDIGGMYRWDAANGRWIPLLDWVGWNNWGYNGVVSIAADPINTNKVWAAVGMYTNSWDPNDGAILRSSDQGATWQITPLPFKLGGNMPGRGMGERLAVDPNNDNILYFGAPSGKGLWRSTDSGATWSQMTNFPDVGTYIANPTDTTGYQSDIQGVVWVAFDKSSSSLGQASKTIFVGVADPNNPVFWSRDGGATWQAVPGAPTGFIPHKGVFDPVNHVLYIATSNTGGPYDGSSGDVWKFSVTSGTWTRISPVPSTDTANDYFGYSGLTIDRQHPNTIMVATQISWWPDTIIFRSTDGGATWTRIWDWTSYPNRSLRYVLDISAEPWLTFGVQPNPPVPSPKLGWMDEAMAIDPFNSDRMLYGTGATLYATNDLTKWDSGGQIHIAPMVKGLEETAVNDLISPPSGAPLISALGDLGGFTHADVTAVPSTIFTSPVFTTGTSVDYAELNPSIIVRAGSFDPSSQPNDRHVAFSTDGGKNWFQGSEPGGVTTGGTVAASADGSRFVWAPGDPGQPVVYAVGFGNSWAASQGVPANAQIRSDRVNPKTFYALSNGTFYRSTDGGVTFQPVAAGLPSSGAVGVMFHAVPGKEGDLWLAASSGLYHSTNGGSSWSAITGVSSAVNVGFGKSAPGSSYPAVFVVGTIGGVTGAYRSDDGGTTWVRINDDQHQYGNWGQAITGDPRIYGRVYIGTNGRGIVYGDIAGAPSGSPSPSVSPSASPSLSPSPSPSSSPSPSPSPSSSPSSSPSPSPSPSPSPSRSPSPSASPSPSSSPSPSSSPSSSPSPTPSSSPVSGGVKVQYKNNDSAPGDNQIKPGLQVVNTGSSSVDLSTVTVRYWFTRDGGSSTLVYNCDWAAIGCGNIRASFGSVNPATPTADTYLQLSFTGGTLAAGGSTGEIQNRVNKSDWSNFTETNDYSYGTNTVFQDWSKVTVYVNGRLVWGTEPSGTSPSPTPSPSPTPSPSPSPSPGGDVTPPSVPTGVVVTGVSGSSVSLAWNASTDNVGVAHYNVYRNGVLVGQPTVTSFTDTGLAAGTAYTYTVAAVDAAGNTSAPSTPVTATTTSPSPSPSPTPSPTPSPTPSPSPSPSLSPSPSPSPSPSPSPSLSPSPSTSPSPSPSPTPSPSSSGVGCRATYVVNSDWGSGFTATVTVTNTGSRATSGWTVAWSFGGNQTVTNYWNTLLTQSGASVTATNLSYNNVIQPGQSTTFGFNATYAGTNTPPTPTCTTNSD

SEQ ID NO: 181 - protein, 441 aa, Talaromyces emersonii
  misc_feature (1)..(441): cbhE
MDPQQAGTATAENHPPLTWQECTAPGSCTTQNGAVVLDANWRWVHDVNGYTNCYTGNTWDPTYCPDDETCAQNCALDGADYEGTYGVTSSGSSLKLNFVTGSNVGSRLYLLQDDSTYQIFKLLNREFSFDVDVSNLPCGLNGALYFVAMDADGGVSKYPNNKAGAKYGTGYCDSQCPRDLKFIDGEANVEGWQPSSNNANTGIGDHGSCCAEMDVWEANSISNAVTPHPCDTPGQTMCSGDDCGGTYSNDRYAGTCDPDGCDFNPYRMGNTSFYGPGKIIDTTKPFTVVTQFLTDDGTDTGTLSEIKRFYIQNSNVIPQPNSDISGVTGNSITTEFCTAQKQAFGDTDDFSQHGGLAKMGAAMQQGMVLVMSLDDYAAQMLWLDSDYPTDADPTTPGIARGTCPTDSGVPSDVESQSPNSYVTYSNIKFGPINSTFTASGD

What is claimed is:

1. An isolated nucleic acid whose nucleotide sequence comprises a sequence having at least 85% identity to at least one of SEQ ID NO: 1 to 158.

2. The isolated nucleic acid of claim 1, wherein the nucleic acid regulates gene expression when operably linked to a gene.

3. The isolated nucleic acid of claim 1, wherein the nucleic acid has a nucleotide sequence comprising a sequence having at least 85% identity to at least one of SEQ ID NO:90, 94, 103, 117, 131, 137, 145, and 158.

4. The isolated nucleic acid of claim 1, wherein the nucleic acid has a nucleotide sequence comprising a sequence having at least 85% identity to at least one of SEQ ID NO: 90 and 103.

5. A vector comprising a gene regulatory element whose nucleotide sequence has at least 85% identity to at least one of SEQ ID NO: 1 to 158.

6. The vector of claim 5, wherein the gene regulatory element has a nucleotide sequence having at least 85% identity to at least one of SEQ ID NO: 90, 94, 103, 117, 131, 137, 145, and 158.

7. The vector of claim 5, wherein the gene regulatory element has a nucleotide sequence having at least 85% identity to at least one of SEQ ID NO: 90 and 103.

8. The vector of claim 5, further comprising a heterologous gene operably linked to the gene regulatory element.

9. The vector of claim 8, wherein the gene regulatory element regulates expression of the heterologous gene.

10. The vector of claim 8, further comprising a gene terminator sequence operably linked to the heterologous gene.

11. The vector of claim 8, wherein the heterologous gene encodes an enzyme polypeptide.

12. The vector of claim 11, wherein the enzyme polypeptide is a cell wall modifying enzyme polypeptide.

13. The vector of claim 12, wherein the cell wall modifying enzyme polypeptide is of an origin selected from the group consisting of archaeal, fungal, insect, animal, and plant.

14. The vector of claim 11, wherein the enzyme polypeptide is a lignocellulolytic enzyme polypeptide.

15. The vector of claim 8, wherein the heterologous gene encodes a polypeptide selected from the group consisting of stress resistance polypeptides, nutrient utilization polypeptides, mycotoxin reduction polypeptides, and male sterility polypeptides.

16. The vector of claim 8, wherein the heterologous gene encodes a polypeptide that confers resistance to at least one herbicide.

17. The vector of claim 16, wherein the heterologous gene encodes a polypeptide selected from the group consisting of phosphinothricin acetyltransferase, glyphosate-resistant enolpyruvoyl-shikimate-3-phosphate synthetase, dalapon dehalogenease, and bromoxynil nitrilase.

18. The vector of claim 8, wherein the heterologous gene encodes a polypeptide that confers resistance to infestation from at least one organism.

19. The vector of claim 18, wherein the polypeptide confers resistance to infestation from an organism selected from the group consisting of insects, bacteria, fungi, and nematodes.

20. The vector of claim 8, wherein the heterologous gene encodes a polypeptide that confers resistance to at least one virus.

21. The vector of claim 8, wherein the heterologous gene encodes an RNA molecule that regulates a plant gene.

22. The vector of claim 8, wherein the heterologous gene encodes a polypeptide having therapeutic value.

23. The vector of claim 8, wherein the heterologous gene encodes a polypeptide selected from the group consisting of phosphomannose isomerase and anthranilate synthase.

24. The vector of claim 5, further comprising a selectable marker gene.

25. The vector of claim 23, wherein the selectable marker gene encodes aminoglycoside phosphotransferase, hygromycin phosphotransferase or neomycin phosophotransferase.

26. The vector of claim 5, wherein the vector is a binary vector.

27. The vector of claim 5, wherein the vector is an expression vector.

28. The vector of claim 5, wherein the vector is a plasmid.

29. A transgenic plant, the genome of which is augmented with:
a recombinant polynucleotide comprising a gene regulatory element that has at least 85% nucleotide sequence identity to at least one of SEQ ID NO: 1 to 158.

30. The transgenic plant of claim 29, wherein the gene regulatory element has at least 85% sequence identity to at least one of SEQ ID NO: 90, 94, 103, 117, 131, 137, 145, and 158.

31. The transgenic plant of claim 30, wherein the gene regulatory element has at least 85% sequence identity to at least one of SEQ ID NO: 90 and 103.

32. The transgenic plant of claim 29, wherein the recombinant polynucleotide further comprises a heterologous gene operably linked to the gene regulatory element.

33. The transgenic plant of claim 32, wherein the gene regulatory element regulates expression of the heterologous gene.

34. The transgenic plant of claim 32, wherein the heterologous gene encodes an enzyme polypeptide.

35. The transgenic plant of claim 34, wherein the enzyme polypeptide is a cell wall modifying enzyme polypeptide.

36. The transgenic plant of claim 35, wherein the cell wall modifying enzyme polypeptide is of an origin selected from the group consisting of archaeal, fungal, insect, animal, and plant.

37. The transgenic plant of claim 34, wherein the enzyme polypeptide is a lignocellulolytic enzyme polypeptide.

38. The transgenic plant of claim 32, wherein the heterologous gene encodes a polypeptide selected from the group consisting of stress resistance polypeptides, nutrient utilization polypeptides, mycotoxin reduction polypeptides, and male sterility polypeptides.

39. The transgenic plant of claim 32, wherein the heterologous gene encodes a polypeptide that confers resistance to at least one herbicide.

40. The transgenic plant of claim 32, wherein the heterologous gene encodes a polypeptide selected from the group consisting of phosphinothricin acetyltransferase, glyphosate-resistant enolpyruvoyl-shikimate-3-phosphate synthetase, dalapon dehalogenease, and bromoxynil nitrilase.

41. The transgenic plant of claim 32, wherein the heterologous gene encodes a polypeptide that confers resistance to infestation from at least one organism.

42. The transgenic plant of claim 41, wherein the polypeptide confers resistance to infestation from an organism selected from the group consisting of insects, bacteria, fungi, and nematodes.

43. The transgenic plant of claim 32, wherein the heterologous gene encodes a polypeptide that confers resistance to at least one virus.

44. The transgenic plant of claim 32, wherein the heterologous gene encodes an RNA molecule that regulates a plant gene.

45. The transgenic plant of claim 32, wherein the heterologous gene encodes a polypeptide having therapeutic value.

46. The transgenic plant of claim 32, wherein the heterologous gene encodes a polypeptide selected from the group consisting of phosphinothricin acetyltransferase, phosphomannose isomerase, glyophosphate resistant 5-enolpyruvoyl-shikimate-3-phosphate synthetase (EPSPS), aminoglycoside phosphotransferase, dalapon dehalogenease, bromoxynil resistant nitrilase, and anthranilate synthase.

47. The transgenic plant of claim 32, wherein the recombinant polynucleotide further comprises a gene terminator sequence operably linked to the heterologous gene.

48. The vector of claim 32, wherein the heterologous gene encodes a polypeptide selected from the group consisting of phosphomannose isomerase and anthranilate synthase.

49. The transgenic plant of claim 29, wherein recombinant polynucleotide further comprises a selectable marker gene.

50. The transgenic plant of claim 49, wherein the selectable marker gene encodes aminoglycoside phosphotransferase, hygromycin phosphotransferase or neomycin phosphotransferase.

51. The transgenic plant of claim 29, wherein the plant is fertile.

52. The transgenic plant of claim 29, wherein the plant is not fertile.

53. The transgenic plant of claim 29, wherein the plant is a monocotyledonous plant.

54. The transgenic plant of claim 53, wherein the monocotyledonous plant is selected from the group consisting of bamboo, barley, maize (corn), millet, miscanthus, rice, rye, sorghum, sugarcane, switchgrass, turfgrass, and wheat.

55. The transgenic plant of claim 29, wherein the plant is a dicotyledonous plant.

56. The transgenic plant of claim 55, wherein the dicotyledonous plant is selected from the group consisting of alfalfa, Arabidopsis, aspen, birch, eucalyptus, flax, canola, cotton, cottonwood (e.g., Populus deltoides), hemlock, hemp, larch, oil seed rape, potato, poplar, sisal, spruce, soybean, sunflower, sweetgum, tobacco, tomato, and willow.

57. A transformed seed from the transgenic plant of claim 29.
